(19) United States
(12) Patent Application Publication
(10) Pub. No.: US 2014/0256904 A1
(43) Pub. Date: Sep. 11, 2014

(54) BIOTECHNOLOGICAL SYNTHESIS PROCESS OF OMEGA-FUNCTIONALIZED CARBON ACIDS AND CARBON ACID ESTERS FROM SIMPLE CARBON SOURCES

(71) Applicants: Steffen Schaffer, Herten (DE); Nicole Decker, Recklinghausen (DE); Jasmin Gielen, Bochum (DE); Harald Haeger, Luedinghausen (DE); Thomas Haas, Muenster (DE); Markus Poetter, Shanghai (CN); Hans-Georg Hennemann, Marl (DE); Mirja Wessel, Bochum (DE); Michael Volland, Duelmen (DE)

(72) Inventors: Steffen Schaffer, Herten (DE); Nicole Decker, Recklinghausen (DE); Jasmin Gielen, Bochum (DE); Harald Haeger, Luedinghausen (DE); Thomas Haas, Muenster (DE); Markus Poetter, Shanghai (CN); Hans-Georg Hennemann, Marl (DE); Mirja Wessel, Bochum (DE); Michael Volland, Duelmen (DE)

(73) Assignee: Evonik Degussa GmbH, Essen (DE)

(21) Appl. No.: 14/238,591

(22) PCT Filed: Aug. 15, 2012
(86) PCT No.: PCT/EP12/65941

§ 371 Date: Feb. 12, 2014

(30) Foreign Application Priority Data
Aug. 15, 2011 (DE) 10 2011 110 946.7

(51) Int. Cl. C12P 13/00; C12P 13/02; C08G 69/08; C12P 7/64

(52) U.S. Cl. CPC C12P 13/005; C12P 7/6409; C12P 7/6436; C12P 13/02; C08G 69/08
USPC 528/310; 435/252.33; 435/252.34; 435/252.3; 435/252.32; 435/134; 435/129; 435/128

(57) ABSTRACT

The subject of the invention is a biotechnological process for the production of ω-functionalized carboxylic acids and of ω-functionalized carboxylate esters from simple carbon sources.

### FIELD OF INVENTION

[0001] The subject of the invention is a biotechnological process for the production of ω-functionalized carboxylic acids and ω-functionalized carboxylate esters from simple carbon sources.

### PRIOR ART

[0002] The biotechnological production of ω-functionalized carboxylic acids and the corresponding esters has previously been described exclusively in the form of biotransformations, wherein the corresponding carboxylic acid as substrate is contacted with an appropriate biological cell, which catalyses the necessary reactions enzymatically.

[0003] Such a process and cells which are suitable for the production of the ω-aminocarboxylic acids and esters thereof are for example described in WO2009077461.

[0004] EP2322598 also describes the production of ω-hydroxycarboxylic acids and esters thereof in specially equipped Candida tropicalis cells from fatty acids as the substrate used. A very similar procedure is described in WO2011008232, wherein Candida cells, wherein the β-oxidation is blocked, form corresponding ω-functionalized carboxylic acids and diacids starting from fatty acids by enzymatic oxidation.

[0005] The fatty acids and derivatives thereof required as substrates are mainly obtained nowadays exclusively from plant and animal oils or fats. This has a large number of disadvantages:

[0006] In particular, as a consequence of the BSE crisis, animal fats as raw materials still meet little client acceptance. Plant oils which contain short- and middle-length fatty acids are either difficult to obtain or are produced in tropical regions. Here the sustainability of production is in many cases called into question, since in some cases rainforest is cleared in order to provide the cultivation areas.

[0007] In addition, particular plant and animal oil or fat raw materials have specific, but defined fatty acid profiles. Hence coupled production takes place here, which can be price-determining for a certain fatty acid species. Last but not least, many of the plant oils are simultaneously also foodstuffs, so that under certain conditions a competition can arise between use as a substance and use as a foodstuff.

[0008] The purpose of the invention was to provide a biotechnological process for the production of ω-functionalized carboxylic acids and ω-functionalized carboxylate esters which is not reliant on fatty acids as educts.

### DESCRIPTION OF THE INVENTION

[0009] Surprisingly, it has been found that the cells described below containing genetic modifications are capable of solving the problem posed for the invention.

[0010] Hence a subject of the present invention are microorganisms which synthesize increased amounts of carboxylic acids or carboxylate esters and on the basis of further genetic features provide these with an ω-functionality.

[0011] A further subject of the invention is the use of the aforesaid microorganisms for the production of ω-functionalized carboxylic acids and ω-functionalized carboxylate esters and a process for the production of ω-functionalized carboxylic acids and ω-functionalized carboxylate esters with use of the microorganisms.

[0012] An advantage of the present invention is that the product inhibition in the production process can be markedly reduced.

[0013] A further advantage of the present invention is that the process enables the production of ω-functionalized carboxylic acids and ω-functionalized carboxylate esters from unrelated carbon sources with high space-time yield, high carbon yield and high concentration in the culture supernatant. As a result of the latter in particular, an efficient workup is facilitated.

[0014] The invention comprises methods for the generation of recombinant microbial cells which are capable of producing ω-functionalized carboxylic acids and ω-functionalized carboxylate esters from unrelated carbon sources.

[0015] The present invention thus comprises a microorganism, which has a first genetic modification, so that compared to its wild type it is capable of forming more carboxylic acid or carboxylate ester from at least one simple carbon source, characterized in that the microorganism has a second genetic modification, which comprises that the microorganism has, in comparison to its wild type, increased activity

of at least one enzyme E₁ which catalyses the conversion of carboxylic acids or carboxylate esters to the corresponding ω-hydroxycarboxylic acids or ω-hydroxycarboxylate esters.

[0016] In connection with the present invention, the term “a first genetic modification” is understood to mean at least one genetic engineering alteration of the microorganism, whereby the expression of one or more genes has been modified, i.e. increased or reduced, compared to the wild type strain.

[0017] In connection with the present invention, the term “simple carbon source” is understood to mean carbon sources wherein in the carbon skeleton at least one C—C bond has been broken and/or at least one carbon atom of the simple carbon source must form at least one new bond with at least one carbon atom of another molecule, in order to arrive at the carbon skeleton of the “more carboxylic acid or carboxylate ester”.

[0018] All stated percentages (%) are, unless otherwise stated, mass percent.

[0019] As the carbon source, carbohydrates such as for example glucose, saccharose, arabinose, xylose, lactose, fructose, maltose, molasses, starch, cellulose and hemicellulose, but also glycerin or very simple organic molecules such as CO₂, CO or synthesis gas, can be used.

[0020] Preferred carboxylic acids or carboxylate esters of the present invention are those which have more than one, in particular 3 to 36, preferably 6 to 24, in particular 10 to 14 carbon atoms in the carboxylic acid chain. This can be linear, branched, saturated or unsaturated and optionally substituted with other groups.

[0021] The carboxylate esters are preferably those wherein the alcohol component is derived from methanol, ethanol or other primary alcohols with 3-18 carbon atoms, in particular methanol and ethanol.

[0022] Particularly preferably, the carboxylic acids are fatty acids selected from the group formic acid, acetic acid, propionic acid, butyric acid, valeric acid, caproic acid, oenanthic acid, caprylic acid, pelargonic acid, capric acid, lauric acid, myristic acid, pentadecanoic acid, palmitic acid, margaric acid, stearic acid, nonadecanoic acid, arachic acid, behenic acid, lignoceric acid, cerotic acid, Montan acid, melissic acid, undecylenic acid, myristoleic acid, petroselic acid, oleic acid, elaidic acid, vaccenic acid, gadoleic acid, icosenic acid, cetoleic acid, erucic acid, nervoic acid, linolic acid, α-linolenic acid, γ-linolenic acid, calendula acid, punicic acid, α-elaeostearic acid, β-elaeostearic acid, arachidonic acid, timnodonic acid, clupanodonic acid, cervonic acid, vernolic acid, ricinoleic acid

and esters thereof, wherein the fatty acid esters are preferably those wherein the alcohol component is derived from methanol, ethanol or other primary alcohols with 3-18 carbon atoms, in particular methanol and ethanol.

[0023] It is preferable according to the invention that microorganisms are used on the basis of good genetic accessibility; selected from the group of the bacteria, particularly from the group containing, preferably consisting of, Abiotrophia, Acalyochloris, Accumulibacter, Acetivibrio, Acetobacter, Acetohalobium, Acetonema, Achromobacter, Acidaminococcus, Acidimicrobium, Acidiphilium, Acidithiobacillus, Acidobacterium, Acidothermus, Acidovorax, Acinetobacter, Actinobacillus, Actinomyces, Actinosynnema, Aerococcus, Aeromicrobium, Aeromonas, Afipia, Aggregatibacter, Agrobacterium, Ahrensia, Akkermansia, Alcanivorax, Alicycliphilus, Alicyclobacillus, Aliivibrio, Alkalilimnicola, Alkaliphilus, Allochromatium, Alteromonadales, Alteromonas, Aminobacterium, Aminomonas, Ammonifex, Amycolatopsis, Amycolicicoccus, Anabaena, Anaerobaculum, Anaerococcus, Anaerofustis, Anaerolinea, Anaeromyxobacter, Anaerostipes, Anaerotruncus, Anaplasma, Anoxybacillus, Aquifex, Arcanobacterium, Arcobacter, Aromatoleum, Arthrobacter, Arthrospira, Asticcacaulis, Atopobium, Aurantimonas, Azoarcus, Azorhizobium, Azospirillum, Azotobacter, Bacillus, Bartonella, Basfia, Baumannia, Bdellovibrio, Beggiatoa, Beijerinckia, Bermanella, Beutenbergia, Bifidobacterium, Bilophila, Blastopirellula, Blautia, Blochmannia, Bordetella, Borrelia, Brachybacterium, Brachyspira, Bradyrhizobium, Brevibacillus, Brevibacterium, Brevundimonas, Brucella, Buchnera, Bulleidia, Burkholderia, Butyrivibrio, Caldalkalibacillus, Caldanaerobacter, Caldicellulosiruptor, Calditerrivibrio, Caminibacter, Campylobacter, Carboxydibrachium, Carboxydothermus, Cardiobacterium, Carnobacterium, Carsonella, Catenibacterium, Catenulispora, Catonella, Caulobacter, Cellulomonas, Cellvibrio, Centipeda, Chelativorans, Chloroflexus, Chromobacterium, Chromohalobacter, Chthoniobacter, Citreicella, Citrobacter, Citromicrobium, Clavibacter, Cloacamonas, Clostridium, Collinsella, Colwellia, Comamonas, Conexibacter, Congregibacter, Coprobacillus, Coprococcus, Coprothermobacter, Coraliomargarita, Coriobacterium, corrodens, Corynebacterium, Coxiella, Crocosphaera, Cronobacter, Ctyptobacterium, Cupriavidus, Cyanobium, Cyanothece, Cylindrospermopsis, Dechloromonas, Deferribacter, Dehalococcoides, Dehalogenimonas, Deinococcus, Delftia, Denitrovibrio, Dermacoccus, Desmospora, Desulfarculus, Desulphateibacillum, Desulfitobacterium, Desulfobacca, Desulfobacterium, Desulfobulbus, Desulfococcus, Desulfohalobium, Desulfomicrobium, Desulfonatronospira, Desulforudis, Desulfotalea, Desulfotomaculum, Desulfovibrio, Desulfurispirillum, Desulfurobacterium, Desulfuromonas, Dethiobacter, Dethiosulfovibrio, Dialister, Dichelobacter, Dickeya, Dictyoglomus, Dietzia, Dinoroseobacter, Dorea, Edwardsiella, Ehrlichia, Eikenella, Elusimicrobium, Endoriftia, Enhydrobacter, Enterobacter, Enterococcus, Epulopiscium, Erwinia, Erysipelothrix, Etythrobacter, Escherichia, Ethanoligenens, Eubacterium, Eubacterium, Exiguobacterium, Faecalibacterium, Ferrimonas, Fervidobacterium, Fibrobacter, Finegoldia, Flexistipes, Francisella, Frankia, Fructobacillus, Fulvimarina, Fusobacterium, Gallibacterium, Gallionella, Gardnerella, Gemella, Gemmata, Gemmatimonas, Geobacillus, Geobacter, Geodermatophilus, Glaciecola, Gloeobacter, Glossina, Gluconacetobacter, Gordonia, Granulibacter, Granulicatella, Grimontia, Haemophilus, Hahella, Halanaerobiumns, Haliangium, Halomonas, Halorhodospira, Halothermothrix, Halothiobacillus, Hamiltonella, Helicobacter, Heliobacterium, Herbaspirillum, Herminiimonas, Herpetosiphon, Hippea, Hirschia, Histophilus, Hodgkinia, Hoeflea, Holdemania, Hydrogenivirga, Hydrogenobaculum, Hylemonella, Hyphomicrobium, Hyphomonas, Idiomarina, Ilyobacter, Intrasporangium, Isoptericola, Isosphaera, Janibacter, Janthinobacterium, Jonesia, Jonquetella, Kangiella, Ketogulonicigenium, Kineococcus, Kingella, Klebsiella, Kocuria, Koribacter, Kosmotoga, Kribbella, Ktedonobacter, Kytococcus, Labrenzia, Lactobacillus, Lactococcus, Laribacter, Lautropia, Lawsonia, Legionella, Leifsonia, Lentisphaera, Leptolyngbya, Leptospira, Leptothrix, Leptotrichia, Leuconostoc, Liberibacter, Limnobacter, Listeria, Loktanella, Lutiella, Lyngbya, Lysinibacillus, Macrococcus, Magnetococcus, Magnetospirillum, Mahella, Mannheimia, Maricaulis, Marinithermus, Marinobacter, Marinomonas, Mariprofundus, Maritimibacter, Marvinbryantia, Megasphaera, Meiothermus, Melissococcus, Mesorhizobium, Methylacidiphilum, Methylibium, Methylobacillus, Methylobacter, Methylobacterium, Methylococcus, Methylocystis, Methylomicrobium, Methylophaga, Methylophilales, Methylosinus, Methyloversatilis, Methylovorus, Microbacterium, Micrococcus, Microcoleus, Microcystis, Microlunatus, Micromonospora, Mitsuokella, Mobiluncus, MooreIla, Moraxella, Moritella, Mycobacterium, Myxococcus, Nakamurella, Natranaerobius, Neisseria, Neorickettsia, Neptuniibacter, Nitratifractor, Nitratiruptor, Nitrobacter, Nitrococcus, Nitrosomonas, Nitrosospira, Nitrospira, Nocardia, Nocardioides, Nocardiopsis, Nodularia, Nostoc, Novosphingobium, Oceanibulbus, Oceanicaulis, Oceanicola, Oceanithermus, Oceanobacillus, Ochrobactrum, Octadecabacter, Odyssella, Oligotropha, Olsenella, Opitutus, Oribacterium, Orientia, Ornithinibacillus, Oscillatoria, Oscillochloris, Oxalobacter, Paenibacillus, Pantoea, Paracoccus, Parascardovia, Parasutterella, Parvibaculum, Parvimonas, Parvularcula, Pasteurella, Pasteuria, Pectobacterium, Pediococcus, Pedosphaera, Pelagibaca, Pelagibacter, Pelobacter, Pelotomaculum, Peptoniphilus, Peptostreptococcus, Persephonella, Petrotoga, Phaeobacter, Phascolarctobacterium, Phenylobacterium, Photobacterium, Pirellula, Planctomyces, Planococcus, Plesiocystis, Polaromonas, Polaromonas, Polymorphum, Polynucleobacter, Poribacteria, Prochlorococcus, Propionibacterium, Proteus, Providencia, Pseudoalteromonas, Pseudo flavonifractor, Pseudomonas, Pseudonocardia, Pseudoramibacter, Pseudovibrio, Pseudoxanthomonas, Psychrobacter, Psychromonas, Puniceispirillum, Pusiffimonas, Pyramidobacter, Rahnella, Ralstonia, Raphidiopsis, Regiella, Reinekea, Renibacterium, Rhizobium, Rhodobacter, Rhodococcus, Rhodoferax, Rhodomicrobium, Rhodopirellula, Rhodopseudomonas, Rhodospirillum, Rickettsia, Rickettsiella, Riesia, Roseburia, Roseibium, Roseiflexus, Roseobacter, Roseomonas, Roseovarius, Rothia, Rubrivivax, Rubrobacter, Ruegeria, Ruminococcus, Ruthia, Saccharomonospora, Saccharophagus, Saccharopolyspora, Sagittula, Salinispora, Salmonella, Sanguibacte, Scardovia, Sebaldella, Segniliparus, Selenomonas, Serratia, Shewanella, Shigella, Shuttleworthia, Sideroxydans, Silicibacter, Simonsiella, Sinorhizobium, Slackia, Sodalis, Solibacter, Solobacterium, Sorangium, Sphaerobacter, Sphingobium, Sphingomonas, Sphingopyxis, Spirochaeta, Sporosarcina, Stackebrandtia, Staphylococcus, Starkeya, Stenotrophomonas, Stigmatella, Streptobacillus, Streptococcus, Streptomyces, Streptosporangium, Subdoligranulum, subvibrioides, Succinatimonas, Sulfitobacter, Sulfobacillus, Sulfuricurvum, Sulfurihydrogenibium, Sulfurimonas, Sulfurospirillum, Sulfurovum, Sutterella, Symbiobacterium, Synechocystis, Syntrophobacter, Syntrophobotulus, Syntrophomonas, Syntrophothermus, Syntrophus, taiwanensis, Taylorella, Teredinibacter, Terriglobus, Thalassiobium, Thauera, Thermaerobacter, Thermanaerovibrio, Thermincola, Thermoanaerobacter, Thermoanaerobacterium, Thermobaculum, Thermobifida, Thermobispora, Thermocrinis, Thermodesulphateator, Thermodesulfobacterium, Thermodesulfobium, Thermodesulfovibrio, Thermomicrobium, Thermomonospora, Thermosediminibacter, Thermosinus, Thermosipho, Thermosynechococcus, Thermotoga, Thermovibrio, Thermus, Thioalkalimicrobium, Thioalkalivibrio, Thiobacillus, Thiomicrospira, Thiomonas, Tolumonas, Treponema, tribocorum, Trichodesmium, Tropheryma, Truepera, Tsukamurella, Turicibacter, Variovorax, Veillonella, Verminephrobacter, Verrucomicrobium, Verrucosispora, Vesicomyosocius, Vibrio, Vibrionales, Victivallis, Weissella, Wigglesworthia, Wolbachia, Wolinella, Xanthobacter, Xanthomonas, Xenorhabdus, Xylanimonas, Xylella, Yersinia, Zinderia and Zymomonas, in particular E. coli, Pseudomonas sp., Pseudomonas fluorescens, Pseudomonas putida, Pseudomonas stutzeri, Acinetobacter sp., Burkholderia sp., Burkholderia thailandensis, Cyanobakterien, Klebsiella sp., Klebsiella oxytoca, Salmonella sp., Rhizobium sp. and Rhizobium meliloti, Bacillus sp., Bacillus subtilis, Clostridium sp., Corynebacterium sp., Corynebacterium glutamicum, Brevibacterium sp., Chlorella sp. and Nostoc sp., with E. coli being particularly preferable.

[0024] In comparison to its wild type, a microorganism according to the invention displays increased activity of at least one enzyme E₁.

[0025] The term “increased activity of an enzyme”, as it is used above and in the following explanations in connection with the present invention is preferably to be understood as increased intracellular activity.

[0026] The explanations now following concerning the increasing of the enzyme activity in cells apply both for the increasing of the activity of the enzyme E₁ and also for all enzymes mentioned below whose activity can optionally be increased, and also for increased formation of alkL gene product.

[0027] Essentially, an increase in the enzymatic activity can be achieved by increasing the copy number of the gene sequence or of the gene sequences which code for the enzyme, using a strong promoter, altering the codon utilization of the gene, increasing the half-life of the mRNA or of the enzyme in various ways, modifying the regulation of the expression of the gene or utilizing a gene or allele which codes for a corresponding enzyme with increased activity and optionally combining these measures. Microorganisms genetically modified according to the invention are for example created by transformation, transduction, conjugation or a combination of these methods with a vector which contains the desired gene, an allele of this gene or parts thereof and contains a promoter enabling the expression of the gene. The heterologous expression is in particular achieved by integration of the gene or the allele into the chromosome of the cell or an extrachromosomally replicating vector.

[0028] An overview of the possibilities for increasing the enzyme activity in cells, with pyruvate carboxylase as the example, is given DE-A-100 31 999, which is herewith incorporated as a reference and the disclosure content whereof forms one part of the disclosure of the present invention regarding the possibilities for increasing enzyme activity in cells.

[0029] The expression of the enzymes and genes mentioned above and all mentioned below is determinable by means of 1- and 2-dimensional protein gel separation followed by optical identification of the protein concentration in the gel with appropriate evaluation software.

[0030] If the increasing of an enzyme activity is based exclusively on increasing the expression of the corresponding gene, then the quantification of the increasing of the enzyme activity can be simply determined by a comparison of the 1- or 2-dimensional protein separations between wild type and genetically modified cell. A common method for the preparation of the protein gels with bacteria and for identification of the proteins is the procedure described by Hermann et al. (Electrophoresis, 22: 1712-23 (2001). The protein concentration can also be analysed by Western blot hybridization with an antibody specific for the protein to be determined (Sambrook et al., Molecular Cloning: a laboratory manual, 2nd Ed. Cold Spring Harbor Laboratory Press, Cold Spring Harbor, N.Y. USA, 1989) followed by optical evaluation with appropriate software for concentration determination (Lohaus and Meyer (1989) Biospektrum, 5: 32-39; Lottspeich (1999), Angewandte Chemie 111: 2630-2647).

[0031] This method is also always an option when possible products of the reaction to be catalysed by the enzyme activity to be determined may be rapidly metabolized in the microorganism or else the activity in the wild type is itself too low for it to be possible adequately to determine the enzyme activity to be determined on the basis of the production formation.

[0032] With regard to the enzyme E₁, the conversion of lauric acid and/or methyl laurate to ω-hydroxylauric acid and/or methyl ω-hydroxylaurate is understood in particular as a measure of the enzyme activity.

### Specified Enzymes E₁

[0033] It is preferable according to the invention if in the microorganism the enzyme E₁ is selected from the group:

E₁ₐ P450 alkane hydroxylases, which preferentially catalyse the following reactions: reduced haem+alkanoic acid (ester)=oxidized haem+ω-hydroxyalkanoic acid (ester)+H₂O,
2 reduced haem+alkanoic acid (ester)=2 oxidized haem+ω-oxoalkanoic acid (ester)+2H₂O or
3 reduced haem+alkanoic acid (ester)=alkane monooxygenase+3 oxidized haem+ω-carboxyalkanoic acid (ester)+3H₂O and preferably are
a component of a reaction system consisting of the two enzyme components “cytochrome P450 alkane hydroxylase and NADPH cytochrome P450 oxidoreductase of EC 1.6.2.4” or
a component of a reaction system consisting of the three enzyme components “cytochrome P450 alkane hydroxylase of the CYP_{—}153 type, ferredoxin NAD(P)⁺ reductases of EC 1.18.1.2 or EC 1.18.1.3 and ferredoxin”, and
E_{1b} AlkB alkane hydroxylases of EC 1.14.15.3, which preferentially catalyse the following reactions: reduced rubredoxin+alkanoic acid (ester)=oxidized rubredoxin+ω-hydroxyalkanoic acid (ester)+H₂O,
2 reduced rubredoxins+alkanoic acid (ester)=2 oxidized rubredoxins+ω-oxoalkanoic acid (ester)+2H₂O or
3 reduced rubredoxins+alkanoic acid (ester)=alkane monooxygenase+3 oxidized rubredoxins+ω-carboxyalkanoic acid (ester)+3H₂O and preferably are
a component of a reaction system consisting of the three enzyme components “AlkB alkane hydroxylase of EC 1.14.15.3, AlkT rubredoxin NAD(P)⁺ reductase of EC 1.18.1.1 or of EC 1.18.1.4 and rubredoxin AlkG”.

[0034] The access numbers stated in connection with the present invention correspond to the NCBI ProteinBank database entries with the date 26.07.2011; as a rule, the version number of the entry is identified here by “numerals” such as for example “0.1”.

[0035] P450 alkane hydroxylases preferred in this connection are selected from the list

AAO73954.1, AAO73953.1, XP_{—}002546279.1, AAA34353.2, P30607.1, XP_{—}002421627.1, XP_{—}718670.1, CAA39366.1, XP_{—}001527524.1, AAO73955.1, AAO73956.1, XP_{—}002546278.1, EEQ43157.1, XP_{—}718669.1, AAA34354.1, P10615.3, XP_{—}002421628.1, 226487, P16141.3, CAA39367.1, Q9Y757.2, XP_{—}001485567.1, AAO73958.1, XP_{—}001383506.2, XP_{—}460111.2, AAO73959.1, Q12586.1, XP_{—}460112.2, AAO73960.1, Q12589.1, AAO73961.1, XP_{—}460110.2, EEQ43763.1, XP_{—}710174.1, EDK41572.2, XP_{—}001482650.1, CAA75058.1, XP_{—}002548818.1, Q12588.1, XP_{—}002422222.1, XP_{—}001383636.2, XP_{—}001525381.1, XP_{—}002548823.1, P30610.1, AAO73952.1, XP_{—}002548428.1, CAA36197.1, XP_{—}002421126.1, AAA34320.1, P16496.3, P30608.1, P24458.1, XP_{—}717999.1, XP_{—}001383817.1, Q9Y758.1, XP_{—}001482092.1, XP_{—}001383710.2, P30609.1, AAB24479.1, XP_{—}457792.1, XP_{—}001524144.1, XP_{—}457727.2, XP_{—}001525578.1, XP_{—}002616743.1, XP_{—}002614836.1, XP_{—}001525577.1, AAO73957.1, Q12585.1, XP_{—}001386440.2, XP_{—}002616857.1, XP_{—}001483276.1, XP_{—}500402.1, EDK39907.2, XP_{—}500560.1, XP_{—}001211376.1, XP_{—}002560027.1, XP_{—}504857.1, XP_{—}500855.1, XP_{—}504406.1, BAA31433.1, XP_{—}500856.1, XP_{—}501148.1, XP_{—}746567.1, XP_{—}001262425.1, XP_{—}001274843.1, XP_{—}002840588.1, XP_{—}002377641.1, XP_{—}001825995.1, XP_{—}001400739.1, XP_{—}718066.1, CAA35593.1, XP_{—}664735.1, XP_{—}002150795.1, XP_{—}500097.1, XP_{—}002483325.1, XP_{—}504311.1, XP_{—}500273.1, XP_{—}002548817.1, EDP54484.1, XP_{—}755288.1, XP_{—}001260447.1, EFY97851.1, ACD75398.1, ADK36660.1, XP_{—}001213081.1, XP_{—}002377989.1, XP_{—}001826299.1, XP_{—}001554811.1, XP_{—}501667.1, XP_{—}002148942.1, ADK36662.1, XP_{—}002565827.1, P30611.1, XP_{—}001267871.1, XP_{—}002372373.1, EFY84686.1, P43083.1, XP_{—}001263094.1, XP_{—}002148355.1, XP_{—}002568429.1, XP_{—}001817314.1, Q12587.1, XP_{—}001396435.1, XP_{—}001938589.1, XP_{—}001388497.2, XP_{—}663661.1, XP_{—}003295335.1, XP_{—}002152088.1, XP_{—}001212071.1, Q12573.1, XP_{—}002379858.1, XP_{—}001821592.1, XP_{—}002844341.1, XP_{—}001394678.1, ACD75400.1, BAK03594.1, XP_{—}003170343.1, XP_{—}001265480.1, XP_{—}002550661.1, EDP55514.1, XP_{—}001528842.1, XP_{—}749919.1, XP_{—}001593058.1, P30612.1, EGC48494.1, EEH04429.1, XP_{—}001585586.1, XP_{—}003236182.1, XP_{—}001400199.1, EEQ46951.1, XP_{—}721410.1, EGP87864.1, XP_{—}002380808.1, XP_{—}001792771.1, XP_{—}001208515.1, XP_{—}001216161.1, XP_{—}003071804.1, EFW16963.1, XP_{—}002542118.1, XP_{—}001936677.1, EGD95268.1, XP_{—}003015678.1, XP_{—}501748.1, XP_{—}003169562.1, EFY96492.1, XP_{—}682653.1, XP_{—}002421356.1, CAK43439.1, EFY93677.1, XP_{—}747767.1, XP_{—}001244958.1, XP_{—}003019635.1, XP_{—}002847463.1, EGP83273.1, EGR52487.1, XP_{—}002622526.1, XP_{—}002563618.1, CBX99718.1, XP_{—}001552081.1, XP_{—}003066638.1, XP_{—}003176049.1, ACD75402.1, BAA05145.1, XP_{—}002482834.1, XP_{—}001257501.1, XP_{—}001934574.1, XP_{—}001269972.1, XP_{—}001587438.1, XP_{—}001215856.1, XP_{—}002149824.1, XP_{—}001550556.1, XP_{—}003011982.1, XP_{—}001827121.1, XP_{—}003233566.1, XP_{—}003022481.1, EGR47044.1, EFQ34695.1, XP_{—}003170005.1, BAG09241.1, XP_{—}002796370.1, XP_{—}003019300.1, XP_{—}002563873.1, CAK40654.1, EEH19741.1, XP_{—}003012518.1, EGD95716.1, XP_{—}003239409.1, BAJ04363.1, XP_{—}001537012.1, BAE66393.1, EGP85214.1, XP_{—}002487227.1, AAV66104.1, EGE07669.1, XP_{—}362943.2, XP_{—}003016806.1, EFQ27388.1, XP_{—}002384360.1, XP_{—}002836323.1, XP_{—}001274959.1, EFZ03093.1, XP_{—}661521.1, XP_{—}002849803.1, XP_{—}001589398.1, AAR99474.1, XP_{—}003189427.1, XP_{—}001823699.1, XP_{—}364111.1, XP_{—}001262753.1, EFY86805.1, XP_{—}001390153.2, XP_{—}002384738.1, XP_{—}001941811.1, XP_{—}001220831.1, XP_{—}003296981.1, XP_{—}002480829.1, BAD83681.1, XP_{—}001827526.2, XP_{—}369556.1, CAK38224.1, EFQ26532.1, XP_{—}002562328.1, XP_{—}001904540.1, EGO52476.1, XP_{—}002382002.1, XP_{—}001225874.1, XP_{—}958030.2, XP_{—}002540883.1, XP_{—}001908957.1, XP_{—}001559255.1, XP_{—}364102.1, EDP48064.1, XP_{—}365075.1, XP_{—}381460.1, CBX95930.1, XP_{—}003054099.1, XP_{—}361347.2, XP_{—}002846867.1, XP_{—}001214985.1, EFQ35175.1, XP_{—}002479062.1, XP_{—}001908613.1, XP_{—}003345380.1, EGR50567.1, XP_{—}002479350.1, XP_{—}001394417.2, XP_{—}001394159.2, XP_{—}002146776.1, EGP86783.1, EFX02953.1, CAK45889.1, XP_{—}003006887.1, XP_{—}002541427.1, XP_{—}750735.1, XP_{—}001257962.1, EGO51720.1, XP_{—}003005336.1, EGP83197.1, XP_{—}002149832.1, XP_{—}003052680.1, XP_{—}365851.1, XP_{—}001799910.1, XP_{—}003347175.1, XP_{—}002565258.1, EGR48918.1, EGR52524.1, XP_{—}964653.2, XP_{—}002147083.1, XP_{—}002843935.1, EEH19393.1, CAC10088.1, EEH47609.1, EEQ92528.1, XP_{—}001246560.1, XP_{—}002626168.1, XP_{—}003024880.1, XP_{—}003169255.1, XP_{—}003013780.1, XP_{—}003235691.1, XP_{—}746816.1, EGD98483.1, XP_{—}001389925.2, XP_{—}002842817.1, XP_{—}002797278.1, ADK36666.1, XP_{—}003305469.1, XP_{—}001548471.1, XP_{—}001806478.1, EFQ34989.1, XP_{—}001552987.1, CAC24473.1, XP_{—}002541530.1, EEQ89262.1, XP_{—}001247332.1, XP_{—}003066043.1, EDP47672.1, XP_{—}002628451.1, XP_{—}001910644.1, EGR44510.1, EFQ36733.1, XP_{—}003052472.1, XP_{—}001393445.2, XP_{—}001522438.1, EGO04179.1, XP_{—}001397944.2, CAK49049.1, EFQ30109.1, XP_{—}001585052.1, EGO30123.1, XP_{—}388496.1, XP_{—}003173913.1, CBF76609.1, XP_{—}003028593.1, EGO04180.1, CAK46976.1, XP_{—}370476.1, XP_{—}002145942.1, XP_{—}003004457.1, ADK36663.1, XP_{—}003040708.1, XP_{—}003351473.1, EFY84692.1, XP_{—}748328.2, XP_{—}003190325.1, XP_{—}002378813.1, EGR46513.1, XP_{—}003033448.1, XP_{—}002145326.1, XP_{—}662462.1, XP_{—}747469.1, XP_{—}001935085.1, EGR45892.1, EGO01601.1, EGP89995.1, XP_{—}001222615.1, XP_{—}001224356.1, EGN93507.1, XP_{—}001934479.1, BAK09464.1, EGO30124.1, XP_{—}001267956.1, ADK36661.1, EFY97845.1, XP_{—}001834501.1, EGO03790.1, XP_{—}001884320.1, XP_{—}003028899.1, AAP79879.1, EFY84206.1, BAK09467.1, XP_{—}003030469.1, XP_{—}001412594.1, XP_{—}001834508.1, XP_{—}001839436.2, XP_{—}002583529.1, XP_{—}001886288.1, XP_{—}002843371.1, XP_{—}001587730.1, BAK09418.1, BAK09442.1, EGO28830.1, EGE03365.1, EFZ01428.1, EGO03065.1, XP_{—}001558890.1, XP_{—}002487181.1, EGO29652.1, AAX49400.1, EFY92529.1, XP_{—}002380252.1, XP_{—}001884460.1, BAK09387.1, XP_{—}001839366.2, XP_{—}003031835.1, EFY99978.1, AAL67906.1, BAG09240.1, XP_{—}002381768.1, XP_{—}001800031.1, XP_{—}001825073.2, BAE63940.1, XP_{—}003028894.1, AAL67905.1, XP_{—}002910303.1, EGO22856.1, XP_{—}003028896.1, XP_{—}681680.1, XP_{—}002486603.1, XP_{—}001838945.2, EGR50064.1, XP_{—}001884349.1, XP_{—}001883816.1, CAK37996.1, CAO91865.1, XP_{—}003031227.1, XP_{—}001258702.1, XP_{—}001586739.1, XP_{—}001560806.1, CBF69707.1, ADN43682.1, XP_{—}001593179.1, XP_{—}001886909.1, XP_{—}001934479.1, XP_{—}001587730.1, XP_{—}001886909.1, XP_{—}001831709.2, XP_{—}001392650.1, XP_{—}366716.2, CAL69594.1, XP_{—}001269140.1, XP_{—}002566307.1, XP_{—}001555473.1, XP_{—}663925.1, XP_{—}001598033.1, XP_{—}001835239.2, EGN97256.1, XP_{—}001554305.1, NP_{—}182075.1, XP_{—}001560475.1, EFQ32286.1, XP_{—}001216788.1, XP_{—}002483975.1, AAC31835.1, NP_{—}850427.1, XP_{—}002143660.1, XP_{—}003327130.1, BAJ78287.1, XP_{—}002880182.1, ACB59278.1, EFQ36688.1, BAJ78285.1, BAJ78286.1, XP_{—}001798699.1, EEH44101.1, BAJ78288.1, BAJ78284.1, EGG02425.1, EGG03011.1, AAA34334.1, NP_{—}001189747.1, EGG02601.1, XP_{—}002978645.1, EGG11203.1, XP_{—}762610.1, XP_{—}762620.1, XP_{—}001545581.1, CAB44684.1, CAN80536.1, AAN05337.1, NP_{—}001049423.1, XP_{—}001791898.1, NP_{—}001031814.1, XP_{—}002279531.1, ABK94777.1, AAZ39646.1, XP_{—}002880183.1, ABC68403.1, XP_{—}002839066.1, EGG03014.1, XP_{—}002320074.1, NP_{—}001182854.1, CBI38795.3, XP_{—}002310605.1, NP_{—}196442.2, XP_{—}002270594.1, ABZ80830.1, XP_{—}002275905.1, CBI38796.3, XP_{—}002476978.1, CAB93726.1, EGG03624.1, EGG06527.1, NP_{—}197710.1, XP_{—}001768338.1, XP_{—}002270673.1, BAJ86572.1, XP_{—}002275806.1, CBI38797.3, XP_{—}002320072.1, CAN60189.1, XP_{—}002986290.1, XP_{—}002465888.1, CAN80040.1, XP_{—}002336104.1, XP_{—}002988354.1, XP_{—}002264277.1, EGD72898.1, XP_{—}002866853.1, EAY95236.1, XP_{—}002979701.1, XP_{—}002988762.1, XP_{—}002304502.1, XP_{—}002873349.1, XP_{—}003192947.1, CAN63571.1, NP_{—}001053615.1, NP_{—}176558.1, EGC49561.1, EGG09027.1, XP_{—}002314581.1, XP_{—}002446966.1, XP_{—}002320802.1, ABC59095.1, XP_{—}003323121.1, XP_{—}002974639.1, XP_{—}002395587.1, XP_{—}002866852.1, XP_{—}002319770.1, NP_{—}001146262.1, NP_{—}001169224.1, AAM65207.1, XP_{—}002529058.1, XP_{—}002886391.1, XP_{—}002320071.1, XP_{—}002446967.1, XP_{—}757870.1, EAY95147.1, XP_{—}002899664.1, EEH05830.1, XP_{—}002874114.1, ADO24345.1, BAJ88802.1, BAA05146.1, XP_{—}002963351.1, EAY88475.1, NP_{—}195658.3, XP_{—}002976944.1, ABC59093.1, XP_{—}002275114.1, XP_{—}003328407.1, CAN75428.1, BAJ86471.1, XP_{—}002981144.1, XP_{—}002277006.1, EAZ26110.1, ACN41008.1, XP_{—}002899542.1, XP_{—}001781614.1, EAY76187.1, BAK06758.1, XP_{—}002511745.1, XP_{—}002982626.1, XP_{—}002963763.1, NP_{—}001065111.1, ABF93892.1, XP_{—}002314117.1, BAK06287.1, XP_{—}001745327.1, NP_{—}001047674.1, XP_{—}002878665.1, XP_{—}002974847.1, NP_{—}179899.1, CAN80156.1, NP_{—}001053543.1, ABC59094.1, XP_{—}002328165.1, XP_{—}002270628.1, XP_{—}002275115.1, XP_{—}002980688.1, XP_{—}002465039.1, AAL91155.1, NP_{—}195910.1, XP_{—}002509820.1, NP_{—}200694.1, CAA62082.1, AAL75903.1, XP_{—}002468241.1, XP_{—}002883546.1, XP_{—}002862636.1, XP_{—}002312905.1, EAY79269.1, AAM12494.1, XP_{—}002875027.1, XP_{—}758010.1, XP_{—}002509524.1, AAP54707.2, XP_{—}002869292.1, NP_{—}001143079.1, ACF82946.1, XP_{—}002270497.1, XP_{—}002979685.1, XP_{—}002465041.1, XP_{—}002533544.1, AAG17470.1, XP_{—}002985393.1, NP_{—}191946.1, XP_{—}002525608.1, AAZ39642.1, XP_{—}002270428.1, XP_{—}002529227.1, CBI24485.3, XP_{—}001763206.1, EGG02922.1, XP_{—}002974848.1, NP_{—}001141467.1, CBI27149.3, NP_{—}001130907.1, XP_{—}002982474.1, NP_{—}001048917.1, XP_{—}002465889.1, ABZ80831.1, XP_{—}002464461.1, EAY88476.1, BAJ90714.1, XP_{—}002893825.1, ACN28568.1, XP_{—}002452782.1, XP_{—}002280004.1, XP_{—}001764611.1, NP_{—}001183394.1, BAJ89570.1, CBI24484.3, BAJ88840.1, ACG38359.1, CAN77648.1, BAJ91452.1, NP_{—}001141345.1, XP_{—}002282185.1, XP_{—}002980994.1, XP_{—}002299820.1, BAJ87982.1, BAJ91842.1, XP_{—}003325270.1, XP_{—}001760399.1, CBI34058.3, ADG34845.1, XP_{—}002523775.1, EEH21852.1, Q50EK3.1, BAK06748.1, XP_{—}002963764.1, ACN34158.1, XP_{—}001764503.1, XP_{—}002311750.1, XP_{—}001782495.1, XP_{—}002988642.1, XP_{—}002465625.1, XP_{—}002892051.1, XP_{—}002279649.1, NP_{—}171666.1, ABK28430.1, BAC42067.1, AED99869.1, NP_{—}174713.1, XP_{—}001781706.1, ABG66204.1, XP_{—}002964775.1, NP_{—}001064901.2, XP_{—}002961706.1, XP_{—}002519477.1, XP_{—}001559854.1, CBH32594.1, BAB92258.1, XP_{—}002264897.1, AAL59025.1, XP_{—}002862576.1, ACL53124.1, XP_{—}002521476.1, NP_{—}200045.1, BAJ89814.1, CBI38794.3, XP_{—}776769.1, NP_{—}001141372.1, EEC74485.1, EAY76557.1, XP_{—}002318861.1, NP_{—}001172660.1, XP_{—}002880978.1, AAO00706.1, BAK07606.1, XP_{—}002979336.1, BAC42841.1, BAF46296.1, XP_{—}002306380.1, XP_{—}002865907.1, ACG34921.1, XP_{—}002876375.1, NP_{—}001056685.1, XP_{—}002264292.1, XP_{—}002893443.1, NP_{—}001066096.1, EEE53477.1, CBH32607.1, EAY94753.1, NP_{—}001130939.1, NP_{—}182121.1, XP_{—}002437749.1, NP_{—}191222.1, XP_{—}002865881.1, XP_{—}569708.1, XP_{—}002279670.1, BAJ94774.1, ABF93894.1, BAD94304.1, ACG33785.1, NP_{—}194944.1, NP_{—}180337.1, AAB63277.1, BAJ85246.1, XP_{—}002456654.1, ACN27732.1, XP_{—}002445325.1, EER40289.1, XP_{—}001838184.2, BAJ85532.1, XP_{—}002866555.1, EAY88477.1, ACG47870.1, XP_{—}002310074.1, XP_{—}002457224.1, EAZ25521.1, BAJ87689.1, NP_{—}001044838.1, XP_{—}002521004.1, XP_{—}002882043.1, XP_{—}002527038.1, XP_{—}002318721.1, XP_{—}002979339.1, NP_{—}176086.1, XP_{—}001560028.1, ABC59092.1, ABF93891.1, ACR38435.1, EAY78983.1, NP_{—}179782.1, CCA21696.1, XP_{—}002334340.1, EFX88387.1, NP_{—}001044554.1, XP_{—}002321857.1, NP_{—}173862.1, NP_{—}195660.1, XP_{—}001554079.1, EAZ13864.1, EEC67630.1, EAY76183.1, AAP54710.2, NP_{—}001065112.2, ACD10924.1, XP_{—}001559275.1, EEC67338.1, XP_{—}002273811.1, ADJ68242.1, NP_{—}001065698.1, CAN66874.1, CAB41474.1, XP_{—}002868908.1, XP_{—}002904660.1, CAR47816.1, NP_{—}189243.1, EAY98229.1, XP_{—}002448320.1, O81117.2, XP_{—}002458797.1, XP_{—}002277129.1, BAJ88829.1, CAN67559.1, BAK08034.1, XP_{—}002894062.1, XP_{—}002894891.1, XP_{—}002279981.1, ABR16451.1, NP_{—}201150.1, AAM60854.1, XP_{—}002521002.1, XP_{—}002521474.1, XP_{—}002875311.1, NP_{—}195661.1, AAP79889.1, NP_{—}175193.1, P98188.1, BAK08270.1, CBI21357.3, XP_{—}002870817.1, XP_{—}002904451.1, ABA95812.1, XP_{—}002998647.1, NP_{—}001066166.2, XP_{—}002894690.1, EFY92064.1, XP_{—}002278009.1, XP_{—}002336002.1, CCA16508.1, XP_{—}002868909.1, EAZ31703.1, C96517, EAY86526.1, XP_{—}002307954.1, XP_{—}002904638.1, XP_{—}002266883.1, XP_{—}002439880.1, XP_{—}002892730.1, ADI52567.1, EGI61791.1, XP_{—}002511196.1, EGG04372.1, XP_{—}002511875.1, ACE75189.1, NP_{—}001055681.1, XP_{—}001589816.1, NP_{—}001170655.1, XP_{—}002300789.1, XP_{—}001934479.1, XP_{—}001587730.1, XP_{—}001554079.1, XP_{—}001559275.1, XP_{—}002868908.1, XP_{—}002998647.1, EFY92064.1, XP_{—}002605799.1, BAC43393.1, ABK28457.1, AAL54887.1, BAC43161.1, XP_{—}002333384.1, ZP_{—}03631129.1, AAL84318.1, BAJ99856.1, XP_{—}002593704.1, YP_{—}001965159.1, XP_{—}002454121.1, EFX88390.1, ABR16969.1, NP_{—}177109.3, XP_{—}002441724.1, NP_{—}001166017.1, BAB92256.1, ACE75340.1, AAZ39645.1, XP_{—}002312417.1, XP_{—}002887239.1, NP_{—}001172609.1, NP_{—}001065766.1, XP_{—}002515053.1, AAL54885.1, ABR16897.1, XP_{—}002878579.1, NP_{—}001140775.1, XP_{—}003275955.1, ZP_{—}08045694.1, BAJ94069.1, XP_{—}001654558.1, XP_{—}002436562.1, EAY88702.1, BAK03685.1, XP_{—}003327629.1, XP_{—}002322606.1, EEH42702.1, XP_{—}002037976.1, NP_{—}172774.1, XP_{—}002282477.1, EFX88388.1, XP_{—}002522465.1, EFZ21470.1, AAO41955.1, AAL54886.1, XP_{—}002450277.1, XP_{—}002862559.1, XP_{—}002335046.1, XP_{—}003328408.1, ACE75187.1, XP_{—}001849294.1, XP_{—}002444132.1, XP_{—}002894061.1, EFN77015.1, EGI69992.1, CBI17962.3, AAL54884.1, XP_{—}002998650.1, XP_{—}002105150.1, XP_{—}002877615.1, EFZ22412.1, XP_{—}002439815.1, XP_{—}002300790.1, CBI40391.3, AEI59774.1, XP_{—}002801151.1, XP_{—}003325267.1, XP_{—}001554577.1, EAY79865.1, XP_{—}002465796.1, XP_{—}002931035.1, ABA91371.1, ACE75338.1, XP_{—}001592850.1, XP_{—}001362981.1, XP_{—}002271246.1, EGB11905.1, NP_{—}176713.1, CBJ27248.1, NP_{—}566155.1, EFX87732.1, EEC71661.1, ACG29046.1, NP_{—}001130576.1, XP_{—}001843663.1, ABK25134.1, EGI65081.1, XP_{—}002722841.1, AAL67908.2, AAO15579.1, YP_{—}122047.1, EFA04617.1, YP_{—}001522424.1, ACB87383.1, NP_{—}001027517.1, EEE52725.1, XP_{—}002078257.1, XP_{—}002722842.1, ZP_{—}05128707.1, XP_{—}003208874.1, AAK31592.1, ABA95747.2, NP_{—}001181472.1, NP_{—}001075572.1, XP_{—}001108915.1, XP_{—}001520882.1, XP_{—}002063219.1, EFZ22408.1, AAL57721.1, EFW47740.1, AAQ20834.1, CAN74644.1, XP_{—}002722849.1, BAC30028.1, CAN75729.1, XP_{—}002115603.1, AAN72309.1, EEC68823.1, CAM18519.1, EAZ13863.1, XP_{—}002906159.1, NP_{—}001003947.1, ZP_{—}01858832.1, XP_{—}002882162.1, XP_{—}002089195.1, XP_{—}002892729.1, CAN68037.1, NP_{—}001130648.1, NP_{—}001166016.1, NP_{—}172773.4, ADJ68241.1, EGI62551.1, EFN63658.1, XP_{—}002300103.1, XP_{—}001658673.1, XP_{—}001367719.1, NP_{—}775146.1, XP_{—}001375048.1, AAH21377.1, NP_{—}727589.1, XP_{—}002271847.1, XP_{—}001809620.1, XP_{—}002897528.1, NP_{—}190421.1, XP_{—}002282468.1, XP_{—}536868.2, EEE58297.1, XP_{—}001992105.1, EAY82190.1, ADD20161.1, XP_{—}001363065.1, EAU77129.3, EAY72807.1, EGG03077.1, NP_{—}001181489.1, NP_{—}001177869.1, XP_{—}001966135.1, BAA99522.1, BAK07250.1, XP_{—}002133118.1, NP_{—}001042228.1, AAL57720.1, XP_{—}002897529.1, AAA35712.1, YP_{—}002275016.1, NP_{—}000770.2, XP_{—}002721578.1, XP_{—}321208.4, AAM09532.1, EFN61085.1, BAK06179.1, EFX88389.1, YP_{—}001602608.1, XP_{—}513140.3, NP_{—}001182438.1, AAD31068.1, NP_{—}001093242.1, XP_{—}001367758.2, EFZ18984.1, YP_{—}691921.1, CAH59968.1, AAS80270.1, CAH59967.1, ACQ99381.2, YP_{—}003810988.1, YP_{—}957888.1, CBW44755.1, ZP_{—}05042596.1, ZP_{—}01913735.1, ZP_{—}05043097.1, ADQ00145.1, YP_{—}004494060.1, ZP_{—}08206912.1, BAE78452.1, NP_{—}114222.1, ACZ56357.1, YP_{—}640381.1, ZP_{—}04384919.1, ZP_{—}08025219.1, ZP_{—}07715822.1, ZP_{—}06847816.1, YP_{—}001702784.1, AEK27137.1, ZP_{—}07716433.1, ZP_{—}08199554.1, YP_{—}004495520.1, YP_{—}345718.1, ZP_{—}08022914.1, YP_{—}001851443.1, BAG50428.1, YP_{—}001135848.1, BAF95905.1, YP_{—}345695.1, ACP39691.1, ACP39664.1, ACP39635.1, ACP39633.1, ACP39710.1, ACP39698.1, ACP39711.1, BAE47475.1, BAE47474.1, ABW76858.1, ACO50699.1, ACP39643.1, ACP39639.1, ACP39708.1, ACM68663.1, ACP39642.1, ACP39684.1, ACP39636.1, ZP_{—}05095005.1, ACP39652.1, BAE47473.1, ACM68664.1, ACP39646.1, ACP39680.1, ACP39692.1, ACP39675.1, ACP39632.1, ZP_{—}05129284.1, ACP39706.1, ACP39695.1, ACM68665.1, ACP39654.1, ACP39665.1, ACP39649.1, BAE47472.1, ACM68668.1, ACP39676.1, ACP39648.1, ACP39647.1, ZP_{—}01102434.1, ACM68666.1, ACP39641.1, ACM68669.1, ZP_{—}01625037.1, ACP39690.1, ACP39696.1, ACP39697.1, ACP39707.1, ACP39682.1, ACP39650.1, ACP39638.1, ZP_{—}05126641.1, CAH04396.1, ACP39658.1, ZP_{—}01102687.1, ACJ06772.1, YP_{—}001413041.1, YP_{—}552058.1, ADE05601.1, ADI19685.1, BAE47479.1, ZP_{—}01626700.1, ZP_{—}01618279.1, CAH61448.1, YP_{—}001411305.1, YP_{—}003591161.1, ZP_{—}01615522.1, ACM68667.1, ACP39651.1, ZP_{—}05095535.1, ZP_{—}01618489.1, NP_{—}418882.1, ADI19983.1, ACP39677.1, BAE47476.1, ACP39655.1, ACP39656.1, ADI19696.1, BAE47477.1, YP_{—}001413399.1, YP_{—}459878.1, BAE47480.1, BAE47481.1, ACP39653.1, BAE47478.1, YP_{—}001681656.1, ZP_{—}01618281.1, ZP_{—}01627262.1, YP_{—}001413057.1, YP_{—}760740.1, YP_{—}001242466.1, YP_{—}001203574.1, CAH61454.1, YP_{—}002129656.1, YP_{—}001672075.1, ACP39709.1, YP_{—}001990805.1, NP_{—}946959.1, YP_{—}001203575.1, YP_{—}783213.1, YP_{—}003059227.1, YP_{—}004110202.1, ACP39645.1, YP_{—}487538.1, CAH61451.1, YP_{—}570816.1, YP_{—}534107.1, YP_{—}001413223.1, YP_{—}001242465.1, YP_{—}557448.1, ZP_{—}08631162.1, NP_{—}773883.1, ZP_{—}00997728.1, ACP39683.1, NP_{—}768493.1, NP_{—}773882.1, ZP_{—}08271781.1, CAH61449.1, YP_{—}003883668.1, YP_{—}003332953.1, YP_{—}004535688.1, YP_{—}495502.1, YP_{—}459378.1, ZP_{—}08700267.1, ZP_{—}01863452.1, ZP_{—}06860085.1, BAE47487.1, YP_{—}617903.1, ZP_{—}08207422.1, BAE47486.1, ZP_{—}01041003.1, BAE47484.1, ACR78197.1, CAH61456.1, ZP_{—}01858113.1, ACP39681.1, BAE47485.1, ACP39673.1, BAE47483.1, ACP39669.1, BAE47482.1, ACP39674.1, ACP39704.1, ACP39703.1, YP_{—}497095.1, ACP39672.1, ACP39702.1, ACP39670.1, ACP39666.1, YP_{—}458852.1, ACP39687.1, ACP39688.1, ACP39634.1, ACP39686.1, ACP39660.1, ACP39700.1, YP_{—}001411309.1, ZP_{—}01465241.1, ACP39701.1, ACP39679.1, ACP39657.1, ACP39694.1, ACP39659.1, ACP39671.1, ACP39693.1 and YP_{—}003342921.1,
in particular
AAO73954.1, AAO73953.1, XP_{—}002546279.1, AAA34353.2, P30607.1, XP_{—}002421627.1, XP_{—}718670.1, CAA39366.1, XP_{—}001527524.1, AAO73955.1, AAO73956.1, XP_{—}002546278.1, EEQ43157.1, XP_{—}718669.1, AAA34354.1, P10615.3, XP_{—}002421628.1, 226487, P16141.3, CAA39367.1, Q9Y757.2, XP_{—}001485567.1, AAO73958.1, XP_{—}001383506.2, XP_{—}460111.2, AAO73959.1, Q12586.1, XP_{—}460112.2, AAO73960.1, Q12589.1, AAO73961.1, XP_{—}460110.2, EEQ43763.1, XP_{—}710174.1, EDK41572.2, XP_{—}001482650.1, CAA75058.1, XP_{—}002548818.1, Q12588.1, XP_{—}002422222.1, XP_{—}001383636.2, XP_{—}001525381.1, XP_{—}002548823.1, P30610.1, AAO73952.1, XP_{—}002548428.1, CAA36197.1, XP_{—}002421126.1, AAA34320.1, P16496.3, P30608.1, P24458.1, XP_{—}717999.1, XP_{—}001383817.1, Q9Y758.1, XP_{—}001482092.1, XP_{—}001383710.2, P30609.1, AAB24479.1, XP_{—}457792.1, XP_{—}001524144.1, XP_{—}457727.2, XP_{—}001525578.1, XP_{—}002616743.1, XP_{—}002614836.1, XP_{—}001525577.1, AAO73957.1, Q12585.1, XP_{—}001386440.2, XP_{—}002616857.1, XP_{—}001483276.1, XP_{—}500402.1, EDK39907.2, XP_{—}500560.1, XP_{—}001211376.1, XP_{—}002560027.1, XP_{—}504857.1, XP_{—}500855.1, XP_{—}504406.1, BAA31433.1, XP_{—}500856.1, XP_{—}501148.1, XP_{—}746567.1, XP_{—}001262425.1, XP_{—}001274843.1, XP_{—}002840588.1, XP_{—}002377641.1, XP_{—}001825995.1, XP_{—}001400739.1, XP_{—}718066.1, CAA35593.1, XP_{—}664735.1, XP_{—}002150795.1, XP_{—}500097.1, XP_{—}002483325.1, XP_{—}504311.1, XP_{—}500273.1, XP_{—}002548817.1, EDP54484.1, XP_{—}755288.1, XP_{—}001260447.1, EFY97851.1, ACD75398.1, ADK36660.1, XP_{—}001213081.1, XP_{—}002377989.1, XP_{—}001826299.1, XP_{—}001554811.1, XP_{—}501667.1, XP_{—}002148942.1, ADK36662.1, XP_{—}002565827.1, P30611.1, XP_{—}001267871.1, XP_{—}002372373.1, EFY84686.1, P43083.1, XP_{—}001263094.1, XP_{—}002148355.1, XP_{—}002568429.1, XP_{—}001817314.1, Q12587.1, XP_{—}001396435.1, XP_{—}001938589.1, XP_{—}001388497.2, XP_{—}663661.1, XP_{—}003295335.1, XP_{—}002152088.1, XP_{—}001212071.1, Q12573.1, XP_{—}002379858.1, XP_{—}001821592.1, XP_{—}002844341.1, XP_{—}001394678.1, ACD75400.1, XP_{—}003170343.1, XP_{—}001265480.1, XP_{—}002550661.1, EDP55514.1, XP_{—}001528842.1, XP_{—}749919.1, XP_{—}001593058.1, P30612.1, EGC48494.1, EEH04429.1, XP_{—}001585586.1, XP_{—}003236182.1, XP_{—}001400199.1, EEQ46951.1, XP_{—}721410.1, EGP87864.1, XP_{—}002380808.1, XP_{—}001792771.1, XP_{—}001208515.1, XP_{—}001216161.1, XP_{—}003071804.1, EFW16963.1, XP_{—}002542118.1, XP_{—}001936677.1, EGD95268.1, XP_{—}003015678.1, XP_{—}501748.1, XP_{—}003169562.1, EFY96492.1, XP_{—}682653.1, XP_{—}002421356.1, CAK43439.1, EFY93677.1, XP_{—}747767.1, XP_{—}001244958.1, XP_{—}003019635.1, XP_{—}002847463.1, EGP83273.1, EGR52487.1, XP_{—}002622526.1, XP_{—}002563618.1, CBX99718.1, XP_{—}001552081.1, XP_{—}003066638.1, XP_{—}003176049.1, ACD75402.1, BAA05145.1, XP_{—}002482834.1, XP_{—}001257501.1, XP_{—}001934574.1, XP_{—}001269972.1, XP_{—}001587438.1, XP_{—}001215856.1, XP_{—}002149824.1, XP_{—}001550556.1, XP_{—}003011982.1, XP_{—}001827121.1, XP_{—}003233566.1, XP_{—}003022481.1, EGR47044.1, EFQ34695.1, XP_{—}003170005.1, BAG09241.1, XP_{—}002796370.1, XP_{—}003019300.1, XP_{—}002563873.1, CAK40654.1, EEH19741.1, XP_{—}003012518.1, EGD95716.1, XP_{—}003239409.1, BAJ04363.1, XP_{—}001537012.1, BAE66393.1, EGP85214.1, XP_{—}002487227.1, AAV66104.1, EGE07669.1, XP_{—}362943.2, XP_{—}003016806.1, EFQ27388.1, XP_{—}002384360.1, XP_{—}002836323.1, XP_{—}001274959.1, EFZ03093.1, XP_{—}661521.1, XP_{—}002849803.1, XP_{—}001589398.1, AAR99474.1, XP_{—}003189427.1, XP_{—}001823699.1, XP_{—}364111.1, XP_{—}001262753.1, EFY86805.1, XP_{—}001390153.2, XP_{—}002384738.1, XP_{—}001941811.1, XP_{—}001220831.1, XP_{—}003296981.1, XP_{—}002480829.1, BAD83681.1, XP_{—}001827526.2, XP_{—}369556.1, CAK38224.1, EFQ26532.1, XP_{—}002562328.1, XP_{—}001904540.1, EGO52476.1, XP_{—}002382002.1, XP_{—}001225874.1, XP_{—}958030.2, XP_{—}002540883.1, XP_{—}001908957.1, XP_{—}001559255.1, XP_{—}364102.1, EDP48064.1, XP_{—}365075.1, XP_{—}381460.1, CBX95930.1, XP_{—}003054099.1, XP_{—}361347.2, XP_{—}002846867.1, XP_{—}001214985.1, EFQ35175.1, XP_{—}002479062.1, XP_{—}001908613.1, XP_{—}003345380.1, EGR50567.1, XP_{—}002479350.1, XP_{—}001394417.2, XP_{—}001394159.2, XP_{—}002146776.1, EGP86783.1, EFX02953.1, CAK45889.1, XP_{—}003006887.1, XP_{—}002541427.1, XP_{—}750735.1, XP_{—}001257962.1, EGO51720.1, XP_{—}003005336.1, EGP83197.1, XP_{—}002149832.1, XP_{—}003052680.1, XP_{—}365851.1, XP_{—}001799910.1, XP_{—}003347175.1, XP_{—}002565258.1, EGR48918.1, EGR52524.1, XP_{—}964653.2, XP_{—}002147083.1, XP_{—}002843935.1, EEH19393.1, CAC10088.1, EEH47609.1, EEQ92528.1, XP_{—}001246560.1, XP_{—}002626168.1, XP_{—}003024880.1, XP_{—}003169255.1, XP_{—}003013780.1, XP_{—}003235691.1, XP_{—}746816.1, EGD98483.1, XP_{—}001389925.2, XP_{—}002842817.1, XP_{—}002797278.1, ADK36666.1, XP_{—}003305469.1, XP_{—}001548471.1, XP_{—}001806478.1, EFQ34989.1, XP_{—}001552987.1, CAC24473.1, XP_{—}002541530.1, EEQ89262.1, XP_{—}001247332.1, XP_{—}003066043.1, EDP47672.1, XP_{—}002628451.1, XP_{—}001910644.1, EGR44510.1, EFQ36733.1, XP_{—}003052472.1, XP_{—}001393445.2, XP_{—}001522438.1, XP_{—}001397944.2, CAK49049.1, EFQ30109.1, XP_{—}001585052.1, XP_{—}388496.1, XP_{—}003173913.1, CBF76609.1, CAK46976.1, XP_{—}370476.1, XP_{—}002145942.1, XP_{—}003004457.1, ADK36663.1, XP_{—}003040708.1, XP_{—}003351473.1, EFY84692.1, XP_{—}748328.2, XP_{—}003190325.1, XP_{—}002378813.1, EGR46513.1, XP_{—}002145326.1, XP_{—}662462.1, XP_{—}747469.1, XP_{—}001935085.1, EGR45892.1, EGP89995.1, XP_{—}001222615.1, XP_{—}001224356.1, XP_{—}001934479.1, XP_{—}001267956.1, ADK36661.1, EFY97845.1, EFY84206.1, XP_{—}001412594.1, XP_{—}002583529.1, XP_{—}002843371.1, XP_{—}001587730.1, EGE03365.1, EFZ01428.1, XP_{—}001558890.1, XP_{—}002487181.1, EFY92529.1, XP_{—}002380252.1, EFY99978.1, BAG09240.1, XP_{—}002381768.1, XP_{—}001800031.1, XP_{—}001825073.2, BAE63940.1, XP_{—}681680.1, XP_{—}002486603.1, EGR50064.1, CAK37996.1, CAO91865.1, XP_{—}001258702.1, XP_{—}001586739.1, XP_{—}001560806.1, CBF69707.1, ADN43682.1, XP_{—}001593179.1, XP_{—}001392650.1, XP_{—}366716.2, CAL69594.1, XP_{—}001269140.1, XP_{—}002566307.1, XP_{—}001555473.1, XP_{—}663925.1, XP_{—}001598033.1, XP_{—}001554305.1, XP_{—}001560475.1, EFQ32286.1, XP_{—}001216788.1, XP_{—}002483975.1, XP_{—}002143660.1, EFQ36688.1, XP_{—}001798699.1, EEH44101.1, AAA34334.1, XP_{—}001545581.1, XP_{—}001791898.1, XP_{—}002839066.1, EGC49561.1, EEH05830.1, BAA05146.1, EEH21852.1, XP_{—}001559854.1, EER40289.1, XP_{—}001560028.1, XP_{—}001554079.1, XP_{—}001559275.1, EFY92064.1, XP_{—}001589816.1, EEH42702.1, XP_{—}001554577.1, XP_{—}001592850.1, YP_{—}691921.1, CAH59968.1, AAS80270.1, CAH59967.1, ACQ99381.2, YP_{—}003810988.1, YP_{—}957888.1, CBW44755.1, ZP_{—}05042596.1, ZP_{—}01913735.1, ZP_{—}05043097.1, ADQ00145.1, YP_{—}004494060.1, ZP_{—}08206912.1, BAE78452.1, NP_{—}114222.1, ACZ56357.1, YP_{—}640381.1, ZP_{—}04384919.1, ZP_{—}08025219.1, ZP_{—}07715822.1, ZP_{—}06847816.1, YP_{—}001702784.1, AEK27137.1, ZP_{—}07716433.1, ZP_{—}08199554.1, YP_{—}004495520.1, YP_{—}345718.1, ZP_{—}08022914.1, YP_{—}001851443.1, BAG50428.1, YP_{—}001135848.1, BAF95905.1, YP_{—}345695.1, ACP39691.1, ACP39664.1, ACP39635.1, ACP39633.1, ACP39710.1, ACP39698.1, ACP39711.1, BAE47475.1, BAE47474.1, ABW76858.1, ACO50699.1, ACP39643.1, ACP39639.1, ACP39708.1, ACM68663.1, ACP39642.1, ACP39684.1, ACP39636.1, ZP_{—}05095005.1, ACP39652.1, BAE47473.1, ACM68664.1, ACP39646.1, ACP39680.1, ACP39692.1, ACP39675.1, ACP39632.1, ZP_{—}05129284.1, ACP39706.1, ACP39695.1, ACM68665.1, ACP39654.1, ACP39665.1, ACP39649.1, BAE47472.1, ACM68668.1, ACP39676.1, ACP39648.1, ACP39647.1, ZP_{—}01102434.1, ACM68666.1, ACP39641.1, ACM68669.1, ZP_{—}01625037.1, ACP39690.1, ACP39696.1, ACP39697.1, ACP39707.1, ACP39682.1, ACP39650.1, ACP39638.1, ZP_{—}05126641.1, CAH04396.1, ACP39658.1, ZP_{—}01102687.1, ACJ06772.1, YP_{—}001413041.1, YP_{—}552058.1, ADE05601.1, ADI19685.1, BAE47479.1, ZP_{—}01626700.1, ZP_{—}01618279.1, CAH61448.1, YP_{—}001411305.1, YP_{—}003591161.1, ZP_{—}01615522.1, ACM68667.1, ACP39651.1, ZP_{—}05095535.1, ZP_{—}01618489.1, NP_{—}418882.1, ADI19983.1, ACP39677.1, BAE47476.1, ACP39655.1, ACP39656.1, ADI19696.1, BAE47477.1, YP_{—}001413399.1, YP_{—}459878.1, BAE47480.1, BAE47481.1, ACP39653.1, BAE47478.1, YP_{—}001681656.1, ZP_{—}01618281.1, ZP_{—}01627262.1, YP_{—}001413057.1, YP_{—}760740.1, YP_{—}001242466.1, YP_{—}001203574.1, CAH61454.1, YP_{—}002129656.1, YP_{—}001672075.1, ACP39709.1, YP_{—}001990805.1, NP_{—}946959.1, YP_{—}001203575.1, YP_{—}783213.1, YP_{—}003059227.1, YP_{—}004110202.1, ACP39645.1, YP_{—}487538.1, CAH61451.1, YP_{—}570816.1, YP_{—}534107.1, YP_{—}001413223.1, YP_{—}001242465.1, YP_{—}557448.1, ZP_{—}08631162.1, NP_{—}773883.1, ZP_{—}00997728.1
and particularly preferably
AAO73954.1, AAO73953.1, XP_{—}002546279.1, AAA34353.2, P30607.1, XP_{—}002421627.1, XP_{—}718670.1, CAA39366.1, AAO73955.1, AAO73956.1, XP_{—}002546278.1, EEQ43157.1, XP_{—}718669.1, AAA34354.1, P10615.3, XP_{—}002421628.1, 226487, P16141.3, CAA39367.1, AAO73958.1, AAO73959.1, Q12586.1, AAO73960.1, Q12589.1, AAO73961.1, EEQ43763.1, XP_{—}710174.1, CAA75058.1, XP_{—}002548818.1, Q12588.1, XP_{—}002422222.1, XP_{—}002548823.1, P30610.1, AAO73952.1, XP_{—}002548428.1, CAA36197.1, XP_{—}002421126.1, AAA34320.1, P16496.3, P30608.1, P24458.1, XP_{—}717999.1, P30609.1, AAB24479.1, AAO73957.1, Q12585.1, XP_{—}718066.1, CAA35593.1, XP_{—}002548817.1, P30611.1, P43083.1, Q12587.1, Q12573.1, XP_{—}002550661.1, P30612.1, EEQ46951.1, XP_{—}721410.1, XP_{—}002421356.1, BAA05145.1, BAG09241.1, CAC24473.1, BAG09240.1, AAA34334.1, BAA05146.1, XP_{—}500402.1, XP_{—}500560.1, XP_{—}504857.1, XP_{—}500855.1, XP_{—}504406.1, BAA31433.1, XP_{—}500856.1, XP_{—}501148.1, XP_{—}500097.1, XP_{—}504311.1, XP_{—}500273.1, XP_{—}501667.1, XP_{—}501748.1, YP_{—}691921.1, CAH59968.1, AAS80270.1, CAH59967.1, ACQ99381.2, YP_{—}003810988.1, YP_{—}957888.1, CBW44755.1, ZP_{—}05042596.1, ZP_{—}01913735.1, ZP_{—}05043097.1, ADQ00145.1, YP_{—}004494060.1, ZP_{—}08206912.1, BAE78452.1, NP_{—}114222.1, ACZ56357.1, YP_{—}640381.1, ZP_{—}04384919.1, ZP_{—}08025219.1, ZP_{—}07715822.1, ZP_{—}06847816.1, YP_{—}001702784.1, AEK27137.1, ZP_{—}07716433.1, ZP_{—}08199554.1, YP_{—}004495520.1, YP_{—}345718.1, ZP_{—}08022914.1, YP_{—}001851443.1, BAG50428.1, YP_{—}001135848.1, BAF95905.1, YP_{—}345695.1, ACP39691.1, ACP39664.1, ACP39635.1, ACP39633.1, ACP39710.1, ACP39698.1, ACP39711.1, BAE47475.1, BAE47474.1, ABW76858.1, ACO50699.1, ACP39643.1, ACP39639.1, ACP39708.1, ACM68663.1, ACP39642.1, ACP39684.1, ACP39636.1, ZP_{—}05095005.1, ACP39652.1, BAE47473.1, ACM68664.1, ACP39646.1, ACP39680.1, ACP39692.1, ACP39675.1, ACP39632.1, ZP_{—}05129284.1, ACP39706.1, ACP39695.1, ACM68665.1, ACP39654.1, ACP39665.1, ACP39649.1, BAE47472.1, ACM68668.1, ACP39676.1, ACP39648.1, ACP39647.1, ZP_{—}01102434.1, ACM68666.1, ACP39641.1, ACM68669.1, ZP_{—}01625037.1, ACP39690.1, ACP39696.1, ACP39697.1, ACP39707.1, ACP39682.1, ACP39650.1 and ACP39638.1 and
proteins with a polypeptide sequence wherein up to 60%, preferably up to 25%, particularly preferably up to 15%, in particular up to 10, 9, 8, 7, 6, 5, 4, 3, 2 or 1% of the amino acid residues are modified compared to the aforementioned reference sequences by deletion, insertion, substitution or a combination thereof and which still possess at least 50%, preferably 65%, particularly preferably 80%, in particular more than 90% of the activity of the protein with the corresponding, aforementioned reference sequence, wherein 100% activity of the reference protein is understood to mean the increasing of the activity of the cells used as a biocatalyst, i.e. the quantity of substance converted per unit time based on the cell quantity used (units per gram cell dry weight [U/g CDW]) in comparison to the activity of the biocatalyst in the absence of the reference protein, wherein the activity in this connection and in connection with the determination of the activity of the enzyme E₁ₐ in general is understood to mean in particular the conversion of lauric acid and/or methyl laurate to ω-hydroxylauric acid and/or methyl ω-hydroxylaurate.

[0036] Modifications of amino acid residues of a given polypeptide sequence which lead to no significant modifications of the properties and function of the given polypeptide are known to those skilled in the art. Thus for example many amino acids can often be exchanged for one another without problems; examples of such suitable amino acid substitutions are: Ala by Ser; Arg by Lys; Asn by Gln or His; Asp by Glu; Cys by Ser; Gln by Asn; Glu by Asp; Gly by Pro; His by Asn or Gln; Ile by Leu or Val; Leu by Met or Val; Lys by Arg or Gln or Glu; Met by Leu or Ile; Phe by Met or Leu or Tyr; Ser by Thr; Thr by Ser; Trp by Tyr; Tyr by Trp or Phe; Val by Ile or Leu. It is also known that modifications, particularly at the N- or C-terminus of a polypeptide in the form of for example amino acid insertions or deletions, often exert no significant influence on the function of the polypeptide.

[0037] AlkB alkane hydroxylases preferred according to the invention are selected from the list

YP_{—}001185946.1, Q9WWW6.1, YP_{—}957898.1, YP_{—}957728.1, YP_{—}694427.1, BAC98365.1, ZP_{—}00957064.1, CAC86944.1, YP_{—}001672212.1, CAB59525.1, ACH99213.1, ACH99215.1, ACH99216.1, AAK56792.1, ACH99229.1, ACS91348.1, AAP41820.1, ZP_{—}05128075.1, CAM58121.1, CAM58085.1, ACQ44675.1, ACZ62808.1, ZP_{—}01738706.1, ZP_{—}01916228.1, ZP_{—}01225325.1, YP_{—}001023605.1, ACJ22747.1, ACT91140.1, AAT91722.2, CBA27418.1, YP_{—}001889129.1, EGC97932.1, ACT91201.1, ZP_{—}05083049.1, YP_{—}554098.1, ZP_{—}01900149.1, ADG26619.1, ADG26657.1, ADG26640.1, ZP_{—}06838771.1, ADG26649.1, ADG26651.1, ZP_{—}02374120.1, YP_{—}368326.1, ZP_{—}02380481.1, ADG26643.1, ADG26628.1, YP_{—}442346.1, ADG26620.1, ADG26647.1, ZP_{—}07673680.1, ADG26638.1, YP_{—}002232139.1, YP_{—}001118743.1, ZP_{—}01764629.1, YP_{—}108945.1, YP_{—}334185.1, ZP_{—}04897834.1, ZP_{—}02889567.1, YP_{—}620386.1, YP_{—}002897546.1, ZP_{—}02166109.1, ZP_{—}02904755.1, ADG26639.1, YP_{—}001892637.1, ADG26642.1, ZP_{—}04939380.1, ZP_{—}02464124.1, YP_{—}102417.1, CAC36356.1, ACJ22727.1, YP_{—}001764240.1, YP_{—}002765609.1, YP_{—}001945311.1, ZP_{—}03586616.1, ACJ22665.1, ZP_{—}03574223.1, CAC37038.1, ZP_{—}02456517.1, YP_{—}001807560.1, YP_{—}002779449.1, AAK97454.1, YP_{—}002912304.1, ACR55689.1, YP_{—}003397515.1, YP_{—}004361423.1, YP_{—}772734.1, ACJ65014.1, ACT31523.1, ACJ22750.1, ZP_{—}07375042.1, YP_{—}002776786.1, ACB11552.1, ZP_{—}02363472.1, ADG26653.1, ZP_{—}04383196.1, ZP_{—}02356342.1, ACJ22751.1, YP_{—}952571.1, ACU43494.1, YP_{—}001135977.1, YP_{—}002764193.1, YP_{—}003855036.1, YP_{—}004078475.1, AAK97448.1, ZP_{—}04388098.1, ACX30747.1, ADG26632.1, ACJ22719.1, ADO21492.1, ZP_{—}05061580.1, ADR72654.1, ACZ65961.1, ACX30755.1, YP_{—}001849604.1, AAV64895.1, YP_{—}004495037.1, YP_{—}702497.1, YP_{—}001069662.1, ZP_{—}06850622.1, BAF34299.1, CAB51024.2, YP_{—}004008018.1, YP_{—}003768535.1, ACJ65013.1, ZP_{—}07282765.1, YP_{—}886209.1, ACJ22725.1, ZP_{—}08155372.1, YP_{—}004493362.1, ZP_{—}05228000.1, ZP_{—}07717360.1, BAD67020.1, YP_{—}004524245.1, ZP_{—}07715778.1, NP_{—}217769.1, ACS91349.1, YP_{—}960105.1, ZP_{—}07014137.1, YP_{—}004746682.1, ZP_{—}08022271.1, ACN62569.1, ADQ37951.1, YP_{—}003647687.1, YP_{—}003837040.1, ADG26600.1, YP_{—}002768905.1, ZP_{—}08553310.1, ADG26597.1, ACJ22749.1, ADG26598.1, YP_{—}001704327.1, ZP_{—}04385381.1, ZP_{—}04751264.1, ADG26609.1, ADG26610.1, ZP_{—}06417258.1, ADG26607.1, ADP98338.1, YP_{—}003275257.1, YP_{—}004084103.1, ADG26630.1, ADG26625.1, ADG26605.1, ADG26599.1, ZP_{—}05218167.1, ADQ37950.1, YP_{—}921354.1, ADG26645.1, ADG26612.1, YP_{—}004493370.1, YP_{—}638501.1, YP_{—}003809668.1, NP_{—}962298.1, ZP_{—}04750514.1, ADG26608.1, ADT82701.1, ACJ06773.1, YP_{—}120833.1, ADG26618.1, ADG26602.1, ADG26623.1, ZP_{—}04383566.1, ZP_{—}08122407.1, YP_{—}004077166.1, ZP_{—}05041651.1, ZP_{—}04608296.1, ABU93351.2, YP_{—}003658078.1, ADQ37949.1, ADG26652.1, YP_{—}002765850.1, AAK97447.1, CAD24434.1, CAC40954.1, ACT91203.1, YP_{—}120829.1, ZP_{—}07282558.1, YP_{—}003298195.1, YP_{—}001851790.1, ZP_{—}05827357.1, ADG26633.1, CAB51020.1, YP_{—}953908.1, ZP_{—}07990416.1, YP_{—}119532.1, ZP_{—}08442348.1, ZP_{—}08276444.1, ZP_{—}04661203.1, ABO12068.2, YP_{—}001846325.1, ADQ37952.1, ZP_{—}08198697.1, ZP_{—}00996652.1, YP_{—}001707231.1, ZP_{—}08433663.1, ZP_{—}08205256.1, YP_{—}003732372.1, YP_{—}906529.1, ACT91204.1, YP_{—}001506534.1, YP_{—}001713880.1, YP_{—}883357.1, YP_{—}004525252.1, ADG26604.1, YP_{—}001134633.1, ZP_{—}08195602.1, ZP_{—}06690500.1, ZP_{—}05826167.1, ADY81595.1, ZP_{—}06056754.1, AAK31348.1, YP_{—}251715.1, ZP_{—}08461977.1, ZP_{—}05847237.1, YP_{—}712218.1, YP_{—}001084670.1, ZP_{—}04387164.1, YP_{—}260041.1, YP_{—}002873097.1, ADG26614.1, AAK97446.1, YP_{—}001280943.1, ZP_{—}04386125.1, AAC36353.2, CCA29159.1, CAD10804.1, CCA29151.1, CAC40953.1, CCA29161.1, ABA55770.1, AAS93604.4, CCA29173.1, CCA29155.1, CCA29156.1, ABA55772.1, CCA29154.1, ABA55793.1, CCA29162.1, CCA29170.1, ZP_{—}03824539.1, CCA29166.1, CCA29136.1, ZP_{—}06065934.1, ABB54493.1, CCA29169.1, YP_{—}003112137.1, CCA29127.1, CCA29148.1, CCA29160.1, ZP_{—}06057458.1, ABA55773.1, YP_{—}004016090.1, CCA29139.1, YP_{—}480358.1, ABA55787.1, CCA29150.1, CCA29130.1, ZP_{—}07775830.1, ABA55779.1, CCA29132.1, YP_{—}003732938.1, BAB33284.1, CCA29149.1, CCA29145.1, ABA55783.1, CCA29137.1, CCA29129.1, CCA29158.1, CCA29176.1, CCA29142.1, CCA29144.1, BAB33287.1, CCA29133.1, CCA29140.1, CCA29135.1, ZP_{—}06066074.1, ZP_{—}03823182.1, CCA29171.1, CCA29152.1, CCA29131.1, ABA55780.1, CCA29163.1, CCA29143.1, CCA29153.1, YP_{—}001580600.1, CCA29134.1, CCA29138.1, YP_{—}046098.1, ZP_{—}06072466.1, ZP_{—}05361594.1, ACU43504.1, CCA29147.1, CCA29146.1, ZP_{—}06061712.1, ACT91185.1, ACT91147.1, ACT91178.1, ACT91167.1, ACT91181.1, ACT91188.1, ZP_{—}06069784.1, ACT91205.1, ZP_{—}06725872.1, ACT91171.1, CCA29128.1, ABY56787.1, ADE05602.1, ACU43474.1, ACJ22718.1, ABB90688.1, ACU43519.1, ABB96093.1, ACU43485.1, ACU43493.1, ABW76857.1, ACT91163.1, ACJ22673.1, ZP_{—}06188150.1, ACT91242.1, ACT91225.1, ACT91211.1, ACU43479.1, ACU43491.1, ACU43522.1, ACU43486.1, ACT91221.1, ACJ22662.1, ACU43506.1, ACU43487.1, ACT91259.1, AAA97866.1, ACU43502.1, YP_{—}001252544.1, ABB96084.1, ACU43520.1, ACJ22668.1, ACU43503.1, ACT91230.1, ABA55777.1, ACT91231.1, ZP_{—}01748311.1, ACJ22724.1, ACU43475.1, ACU43511.1, ACU43490.1, ZP_{—}08330953.1, ACU43484.1, CBX01596.1, ACT91168.1, YP_{—}096989.1, ACT91215.1, YP_{—}125370.1, ACT91233.1, ACU43478.1, ADE05603.1, ACJ22715.1, ACU43512.1, ACT91196.1, ACJ22692.1, ACU43510.1, ACU43521.1, ACT91174.1, ACT91213.1, ACT91142.1, ACT91206.1, ACT91216.1, ACT91182.1, ACT91255.1, ACT91246.1, ACT91217.1, ACT91155.1, ACT91240.1, ACT91207.1, ACU43495.1, YP_{—}128249.1, ACT91160.1, YP_{—}004052990.1, ACT91226.1, ACU43507.1, ABO61855.1, ACT91214.1, ACT91220.1, YP_{—}001188237.1, ACJ22689.1, ZP_{—}01689499.1, YP_{—}004379711.1, ACJ22748.1, ABB90683.1, ACT91223.1, ACT91235.1, ABO61786.1, ACU43508.1, ACU43492.1, ACT91219.1, ACT91244.1, ABO61856.1, ACT91239.1, ACU43473.1, ABO61850.1, ACT91262.1, ACT91261.1, ACT91224.1, ACU43499.1, ACU43488.1, ADO21767.1, YP_{—}004654946.1, ADO21777.1, ABB96089.1, ABO61852.1, ABO61847.1, ACT91222.1, ADO21764.1, ACU43477.1, ADO21773.1, ABO61787.1, ABB96080.1, ABO61857.1, ACT91228.1, ABB96070.1, ADO21744.1, ACT91245.1, CAG17608.1, ADO21747.1, YP_{—}001349162.1, ABK63807.1, ZP_{—}06879583.1, NP_{—}250216.1, ACT91234.1, ZP_{—}01364874.1, ABO61789.1, ADO21772.1, ACU43516.1, ACU43505.1, ACU43501.1, ACT91236.1, ZP_{—}07792758.1, ACZ64723.1, ADO21743.1, ADO21759.1, ACZ64752.1, ADO21755.1, ACD75517.1, YP_{—}790621.1, ACB11551.1, ADO21748.1, NP_{—}251264.1, ZP_{—}01365940.1, ADO21762.1, ADO21739.1, ACU43496.1, ABO61854.1, ZP_{—}06878434.1, ACU43489.1, ACU43483.1, ADO21746.1, ACT91237.1, ZP_{—}01895378.1, ACT91164.1, ADO21736.1, ACJ22711.1, ACZ64754.1, ZP_{—}05042146.1, ADO21688.1, ADO21648.1, YP_{—}001348003.1, ADP98656.1, ADO21737.1, ADO21760.1, ADO21754.1, ADO21740.1, ACZ64758.1, ACU43497.1, ZP_{—}01912185.1, ABB96111.1, ACU43482.1, ACB11549.1, ADO21775.1, CCA29157.1, ADO21681.1, ADO21668.1, ADO21656.1, ACU43517.1, ACT91165.1, ACJ22695.1, ACJ22688.1, ABB96071.1, ADO21763.1, ACT91241.1, ADO21735.1, ACB11550.1, ADO21778.1, ACT91172.1, ADO21765.1, ABB96087.1, CBJ30233.1, ACJ22752.1, ABB96105.1, ACB15251.1, ACJ22694.1, ACZ64741.1, ACZ64706.1, ABB96108.1, ACT91191.1, ABB96101.1, ABB90691.1, ACZ64745.1, YP_{—}691842.1, ABB96075.1, ABB90682.1, ABB90690.1, ADO21676.1, ADO21679.1, ABO61768.1, YP_{—}435857.1, ACJ22722.1, ACT91238.1, ACZ64725.1, CAC14062.1, ADO21682.1, ACZ64771.1, ACZ64718.1, ACZ64724.1, ADO21670.1, ADO21667.1, CAC37048.1, ACZ64708.1, ABB96092.1, ACJ22687.1, ACZ64703.1, ADO21690.1, ABB92364.1, ACB11547.1, ACZ64720.1, ADO21655.1, ACZ64717.1, ADO21680.1, ACZ64757.1, ACZ64733.1, ACT91144.1, ACU43481.1, ACT91179.1, ZP_{—}02181409.1, ACZ64704.1, ABB96073.1, ACJ22675.1, ACZ64721.1, ABB96090.1, ACJ22729.1, ACU43515.1, ZP_{—}01307000.1, ABB90685.1, YP_{—}003862088.1, ACZ64715.1, ACZ64710.1, ACJ22735.1, ABB90687.1, ADO21661.1, ADO21674.1, ACT91177.1, ABB54492.1, ABB96076.1, ABB92365.1, ACT91194.1, ADO21689.1, ACJ22691.1, ABB90681.1, ADO21649.1, ADO21671.1, ACZ64728.1, ABB96095.1, CAC40945.1, ADO21652.1, ADO21665.1, ADE08461.1, ADO21678.1, ACZ64705.1, ACJ22690.1, ADO21675.1, ADO21685.1, ABB96072.1, ACJ22736.1, ACB11540.1, ABB96091.1, ACI04540.1, ACT91251.1, ACT91146.1, ACT91166.1, ACT91156.1, ADO21752.1, ADO21673.1, ADO21725.1, ABB96104.1, ABB90694.1, ABB90696.1, ACT91173.1, ADO21647.1, ZP_{—}03700804.1, ACT91232.1, ADO21694.1, CAC40949.1, ABB92361.1, ACT91195.1, ACI04538.1, ADO21691.1, ACJ22685.1, ADO21653.1, ABS12461.1, ACZ64736.1, ACZ64772.1, ABB90680.1, ADO21659.1, ACZ64774.1, ADO21684.1, ADO21729.1, ADO21650.1, ADO21733.1, ACZ64755.1, ACZ64751.1, ABA55775.1, ADO21738.1, CCA29174.1, ADO21669.1, ACZ64744.1, ADO21654.1, ADO21768.1, ABB96106.1, CCA29168.1, ACT91176.1, ACB11555.1, ABB90695.1, ADO21660.1, ACJ22666.1, ACZ64778.1, ADO21766.1, ADO21677.1, ZP_{—}02161687.1, CCA29165.1, ADO21745.1, ACB11548.1, ABB90689.1, ABB96107.1, AAT46052.1, ADO21718.1, ADO21722.1, ABB96088.1, EFW40271.1, ADO21686.1, ABB96103.1, ACU43500.1, ACB11536.1, ABB92360.1, CCA29167.1, ACT91199.1, ACZ64770.1, ACJ22716.1, ABA55786.1, ACZ64737.1, ABB96083.1, ACJ22676.1, ACZ64735.1, ACT91212.1, ACJ22765.1, CAJ01371.1, CAC17734.1, ABD36389.1, ACB11537.1, CAC08515.1, ACZ64714.1, ACU43513.1, ABB96082.1, ADN21387.1, ADO21711.1, ABD36392.1, ABR10770.1, CAC37049.1, ABB96098.1, ABB90692.1, ACB11535.1, ACZ64768.1, ACJ22756.1, ABB96094.1, ABA55791.1, ABB96078.1, ACT91141.1, ACZ64779.1, ACZ64750.1, CAJ01370.1, ACZ64753.1, ACU43480.1, ABA55794.1, ABB96085.1, ABB96110.1, YP_{—}004448035.1, ACZ64709.1, ABB96102.1, ACZ64773.1, CCA29175.1, ACZ64749.1, ACZ64756.1, ACZ64781.1, ABO61777.1, ACZ64759.1, ACZ64764.1, ACZ64740.1, ACT91249.1, ZP_{—}03702922.1, ACB11545.1, ACZ64775.1, ACZ64769.1, ACT91145.1, ACZ64742.1, ACT91254.1, ACZ64762.1, ACZ64716.1, ACZ64777.1, ADM26559.1, ABB96096.1, ACZ64780.1, ZP_{—}01201250.1, CAH55829.1, ZP_{—}01052921.1, ABB96077.1, ADO21658.1, ACT91161.1, ABB90684.1, ACR56750.1, ABB90697.1, ACZ64746.1, ABB92367.1, ACT91139.1, ACZ64763.1, ACT91200.1, ABO61773.1, ABB96081.1, ACZ64748.1, ACZ64782.1, ACU43498.1, ADO21651.1, ABB90679.1, BAG06233.1, ACZ64747.1, ABB96086.1, ACZ64761.1, ABB92370.1, ABO61774.1, ACT91175.1, ABB90686.1, ACB11546.1, ZP_{—}01740604.1, ABO61785.1, YP_{—}001531377.1, XP_{—}001434539.1, ABA55767.1, ABO21865.1, ABF55636.1, ABA55751.1, ABB90698.1, ADD12311.1, ACZ64765.1, ABB92366.1, ABB92368.1, ACI04539.1, XP_{—}001023288.1, ACZ64783.1, ADO21692.1, ZP_{—}01753800.1, ACZ64760.1, ACZ64700.1, ZP_{—}01055480.1, ACZ64767.1, ACZ64701.1, ABA55745.1, ABA55752.1, ACZ64766.1, YP_{—}614640.1, ABA55759.1, ADO21723.1, BAG06232.1, ZP_{—}01002389.1, ABB90693.1, ACT91264.1, ABB92358.1, BAF99026.1, ABR10769.1, ZP_{—}00959618.1, AEA08580.1, ADD22986.1, CAB51023.1, CAC40958.1, ADO21709.1, CAB51025.1, ACI15226.1, ACJ22680.1, ZP_{—}05741459.1, ACT91248.1, ABU48567.1, ABO61792.1, ACJ22754.1, EFN53276.1, AAL87644.1, ACT91209.1, ZP_{—}02147281.1, ACU43518.1, ACZ64776.1, ACB11543.1, ACT91151.1, ACJ22764.1, ACT91159.1, ABA18186.1, AEA08579.1, ADO21770.1, ABF55634.1, CAA27179.1, ABA55741.1, ADO21705.1, ZP_{—}01754375.1, ACB11541.1, ACR56751.1, ACT91250.1, ADO21769.1, ADO21753.1, ABB96097.1, ACT91208.1, ABO21867.1, ADO21757.1, ACB11554.1, ABA55749.1, CAC40951.1, ADO21719.1, ABB96074.1, ZP_{—}00954267.1, ZP_{—}05786269.1, AEH76912.1, ABA55742.1, ABA55748.1, BAG06236.1, ADO21732.1, ABA55750.1, ABA55768.1, ACT31522.1, ZP_{—}05090796.1, ACZ64739.1, YP_{—}915886.1, ADO21731.1, CAC40948.1, XP_{—}001032273.1, AEH76911.1, ABA55743.1, ABO61769.1, ABA55755.1, ZP_{—}05122263.1, ADO21756.1, ABA55744.1, ABA55746.1, ZP_{—}01901011.1, ZP_{—}02150761.1, ADO21742.1, ACR56752.1, ABA55747.1, ABF55637.1, ABA55740.1, ABA55760.1, ZP_{—}00948812.1, ABA55804.1, ADO21771.1, ZP_{—}05342453.1, ABF55638.1, YP_{—}508336.1, ABB92357.1, ZP_{—}01049702.1, ABU48546.1, ABU48555.1, ABA55764.1, ABO21866.1, ZP_{—}05079274.1, ZP_{—}01880441.1, ACZ64738.1, ZP_{—}05842058.1, ACT91218.1, ABA55769.1, ABA55739.1, ABA55803.1, ACT91247.1, ABA55782.1, ACZ17539.1, ABB92359.1, ACH69966.1, ZP_{—}01035050.1, ACZ17537.1, ABA55774.1, ACZ64729.1, ACZ17538.1, ZP_{—}01751972.1, ACZ64731.1, ACZ64702.1, AAR13803.1, AEJ28400.1, ZP_{—}05099213.1, CAB51021.1, ACZ17531.1, AEH76914.1, ZP_{—}05051648.1, ACZ64726.1, ACZ17540.1, ACZ64727.1, ZP_{—}02152773.1, ACT91253.1, ACZ17536.1, XP_{—}001423873.1, ACZ17534.1, YP_{—}168645.1, ACZ17520.1, ABY56786.1, ACB11539.1, ZP_{—}01157350.1, AEH76910.1, ABY56784.1, AAY85982.1, ACT91257.1, ACB11544.1, ACZ17532.1, ZP_{—}01746661.1, ABA55771.1, BAG06235.1, EGR32049.1, YP_{—}001166282.1, ABO61799.1, ABA55757.1, AEH76915.1, ACO59264.1, ABO26125.1, AEA08577.1, ACT91265.1, ABY56785.1, ACZ17528.1, ABO61798.1, ADO21749.1, ACT91263.1, ACT91252.1, ACZ64722.1, ABO61771.1, ACZ17526.1, ABO26123.1, ADO21714.1, ZP_{—}01000906.1, ABO61796.1, ADC29534.1, ACB15250.1, ACD47155.1, ACZ17525.1, ACB11553.1, ABD36391.1, AEH76913.1, ACZ17523.1, ABO61781.1, ACZ17524.1, ZP_{—}01914093.1, ACB11538.1, ZP_{—}01015838.1, ACJ22693.1, ACB15252.1, CAC86945.1, ACO59265.1, ABO61791.1, ACZ17521.1, ABO26124.1, ACZ64732.1, ACU43514.1, ACT91256.1, ACM63043.1, ACS75820.1, ZP_{—}08666479.1, CAH03133.1, BAG06234.1, AEH76916.1, ABO61790.1, ABE72965.1, ACZ64711.1, ACB11542.1, AAY26148.1, ABA55776.1, ACZ17522.1, ACZ64734.1, AEA08578.1, ACZ17530.1, ZP_{—}04062748.1, ACJ22755.1, NP_{—}969039.1, AAY26149.1, ACJ22761.1, ABU48543.1, ZP_{—}08414255.1, AAT91720.1, ZP_{—}01444283.1, ABA55796.1, ABU48542.1, YP_{—}001042010.1, YP_{—}001234392.1, YP_{—}351510.1, ACZ64730.1, ZP_{—}08634611.1, ACZ17529.1, ACJ22667.1, AAT91719.1, YP_{—}004283531.1, ABO61801.1, ACZ17519.1, ABO15266.1, CAB51040.1, ACZ64707.1, ACJ22766.1, ABO26121.1, ZP_{—}01878984.1, CAB51039.1, ABA55795.1, ABO15269.1, ABO15247.1, ACJ22763.1, ABO15251.1, ACZ17527.1, ABO15270.1, ACJ22769.1, ADE06670.1, ZP_{—}05780387.1, ABO61770.1, ACT91258.1, ABO15258.1, ABO15257.1, ABU48545.1, CAC86946.1, ABO15267.1, ZP_{—}01741446.1, ABU48544.1, YP_{—}002296646.1, AEH76917.1, ADC29550.1, YP_{—}002527219.1, ABK88246.1, ADN21388.1, ACT91210.1, ZP_{—}05064795.1, ABJ16487.1, XP_{—}002675644.1, ABJ16489.1, ADA71089.1, ADA71088.1, AAT46053.1, ZP_{—}01744806.1, ZP_{—}01037964.1, ZP_{—}00955262.1, ABJ16493.1, YP_{—}001840157.1, ZP_{—}00964204.1, ABB40596.1, ACB15249.1, ADD82963.1, YP_{—}004499590.1, ZP_{—}01011524.1, ACJ22758.1, ZP_{—}01748906.1, ACV30052.1, ZP_{—}06191942.1, YP_{—}001188029.1, ACD63080.1, YP_{—}166583.1, AAV41375.1, ZP_{—}00998265.1, ACJ22757.1, ABB13506.2, ABI13999.1, ABI14004.1, ABB13509.1, YP_{—}371980.1, ZP_{—}01755711.1, ZP_{—}05065835.1, ZP_{—}00959368.1, XP_{—}001020063.1, ABJ16481.1, ABI14006.1, ZP_{—}05101918.1, ZP_{—}01913733.1, ABI14001.1, ABM92270.1, ABI14003.1, CAH03132.1, YP_{—}973211.1, ABA55797.1, YP_{—}003578527.1, ABJ16483.1, ABJ16482.1, CBY78068.1, ACT91260.1, YP_{—}509155.1, ABB13508.1, ABJ16485.1, ABO61779.1, ABI14005.1, ACM63042.1, ADC29543.1, ZP_{—}02153440.1, YP_{—}709335.1, ABI13998.1, ABI14002.1, AAB70825.1, ACX30751.1, ABI14000.1, YP_{—}003617173.1, ZP_{—}01155421.1, ACX30752.1, NP_{—}542887.1, ADC29546.1, AAC38359.1, ADC29541.1, XP_{—}001020064.1, ZP_{—}01442436.1, ZP_{—}05103090.1, ADC29544.1, ABO61809.1, AAY89939.1, ACH99235.1, CAH55830.1, ABO26095.1, YP_{—}004011670.1, ABO26084.1, ADA71083.1, ABO26087.1, ABO61806.1, ADC29531.1, ABO26109.1, ACJ22753.1, ABO26089.1, ABO26093.1, ABO26092.1, ABO61827.1, ABO26105.1, ABO26112.1, AAT91721.1, ABO26120.1, ABO26090.1, ABO26088.1, ABO61811.1, ABO61783.1, CAH55827.1, ACH99232.1, ABO61828.1, ADC29530.1, ACH99234.1, AAQ88276.1, CAH55823.1, ABO26103.1, ACH99233.1, ABO61836.1, ABO26094.1, ABO61840.1, YP_{—}004534277.1, ZP_{—}05845010.1, ABO61821.1, ACH99231.1, AAV68403.1, ABO61839.1, CAH56098.1, ABO26085.1, ABO61826.1, ABO61822.1, ABO26110.1, ABO61810.1, ABO61844.1, ABO61825.1, ABO26099.1, ACJ22767.1, ABO26102.1, YP_{—}004535707.1, ACJ22762.1, ABO26097.1, BAC65444.1, ABO61829.1, YP_{—}114083.1, CAH55828.1, ABO26106.1, YP_{—}552229.1, NP_{—}049190.1, ABO26116.1, CAH56107.1, CAM32407.1, ABO26101.1, ABO61841.1, ABM79805.1, ZP_{—}05075249.1, AAC27438.2, YP_{—}003754872.1, ADC29532.1, ADA71139.1, ADA71107.1, ADA71095.1, YP_{—}001268217.1, ADA71126.1, ADA71094.1, CAH56108.1, ADC29533.1, ADA71085.1, ZP_{—}05054453.1, ADA71097.1, ADA71086.1, ADA71114.1, ADC29548.1, ADA71101.1, ADC29547.1, ADA71138.1, ADC29542.1, ADA71098.1, ADA71128.1, ADA71105.1, ADA71093.1, ADA71135.1, ADA71100.1, YP_{—}557479.1, ADA71113.1, ADA71091.1, ADC29537.1, ADA71084.1, ADA71090.1, CAH56094.1, XP_{—}002945767.1, ADA71137.1, ADA71103.1, ADA71118.1, ADA71133.1, ADA71102.1, ADC29536.1, CAH56100.1, CAH56101.1, ACI15225.1, ACI15225.1, ABO26091.1, CAH55826.1, CAH55824.1, ZP_{—}08484419.1, ADA71111.1, ACJ22759.1, CAH55825.1, CAH56106.1, CAH56099.1, CAC40957.1, ZP_{—}05075037.1, CAH56102.1, ZP_{—}06846296.1, ABJ16491.1, ZP_{—}05067177.1, XP_{—}001698107.1, BAH10789.1, BAH10791.1, BAH10793.1, BAH10788.1, ABJ16490.1, BAH10800.1, BAH10790.1, BAH10792.1, ZP_{—}05075214.1, BAH10799.1, BAH10795.1, BAH10787.1, BAH10798.1, BAH10794.1, BAH10801.1, BAH10796.1, BAH10797.1, BAH10802.1, CAH56095.1, CAH56096.1, ADC29538.1, ABX76425.1, ZP_{—}06727686.1, ZP_{—}07774883.1, YP_{—}001615042.1, in particular YP_{—}001185946.1, Q9WWW6.1, YP_{—}957898.1, YP_{—}957728.1, YP_{—}694427.1, BAC98365.1, ZP_{—}00957064.1, CAC86944.1, YP_{—}001672212.1, CAB59525.1, ACH99213.1, ACH99215.1, ACH99216.1, AAK56792.1, ACH99229.1, ACS91348.1, AAP41820.1 and particularly preferably YP_{—}001185946.1,
and
proteins with a polypeptide sequence wherein up to 60%, preferably up to 25%, particularly preferably up to 15%, in particular up to 10, 9, 8, 7, 6, 5, 4, 3, 2 or 1% of the amino acid residues are modified compared to the aforementioned reference sequences by deletion, insertion, substitution or a combination thereof and which still possess at least 50%, preferably 65%, particularly preferably 80%, in particular more than 90% of the activity of the protein with the corresponding, aforementioned reference sequence, wherein 100% activity of the reference protein is understood to mean the increasing of the activity of the cells used as a biocatalyst, i.e. the quantity of substance converted per unit time based on the cell quantity used (units per gram cell dry weight [U/g CDW]) in comparison to the activity of the biocatalyst in the absence of the reference protein, wherein the activity in this connection and in connection with the determination of the activity of the enzyme E_{1b} in general is understood to mean in particular the conversion of lauric acid and/or methyl laurate to ω-hydroxylauric acid and/or methyl ω-hydroxylaurate.

### Auxiliary Enzymes to E₁

[0038] It is preferable according to the invention that, if E₁ₐ is a eukaryotic P450 alkane hydroxylase, the microorganism according to the invention also has increased activity of a NADPH cytochrome P450 oxidoreductase of EC 1.6.2.4 in comparison to its wild type. This has the technical effect that the activity of the eukaryotic P450 alkane hydroxylases is increased and the product yields increased.

[0039] NADPH cytochrome P450 oxidoreductases of EC 1.6.2.4 catalyse the following reaction: oxidized cytochrome P450+NADPH⁺=reduced cytochrome P450+NADP⁺+H⁺

[0040] It is preferable according to the invention that, if E₁ₐ is a prokaryotic P450 alkane hydroxylase of the CYP_{—}153 type, the microorganism according to the invention also has increased activity of a ferredoxin NAD(P)⁺ reductase of EC 1.18.1.2 or EC 1.18.1.3 and/or of a ferredoxin, in comparison to its wild type. This has the technical effect that the activity of the prokaryotic P450 alkane hydroxylase of the CYP_{—}153 type is increased and the product yields increased. Ferredoxin NAD(P)⁺ reductases of EC 1.18.1.2 or EC 1.18.1.3 catalyse the following reaction: oxidized ferredoxin+NAD(P)H+ H⁺=reduced ferredoxin+NAD(P)⁺ and are preferably encoded by a gene which is situated in direct proximity to a gene of an aforementioned prokaryotic P450 alkane hydroxylase of the CYP_{—}153 type or of a ferredoxin described in connection with this invention.

[0041] The term “in direct proximity” means that a maximum of three other structural genes are located between the genes in question.

[0042] Ferredoxins catalyse the following reactions:

alkane hydroxylase+reduced ferredoxin+alkanoic acid (ester)=alkane monooxygenase+oxidized ferredoxin+ω-hydroxyalkanoic acid (ester)+H₂O,
alkane hydroxylase+2 reduced ferredoxins+alkanoic acid (ester)=alkane hydroxylase+2 oxidized ferredoxins+ω-oxoalkanoic acid (ester)+2H₂O or
alkane hydroxylase+3 reduced ferredoxins+alkanoic acid (ester)=alkane hydroxylase+3 oxidized ferredoxins+ω-carboxyalkanoic acid (ester)+3H₂O and
are preferably encoded by a gene which is situated in direct proximity to a gene of an aforementioned prokaryotic P450 alkane hydroxylase of the CYP_{—}153 type or an aforementioned ferredoxin NAD(P)⁺ reductase of EC 1.18.1.2 or EC 1.18.1.3. The term “in direct proximity” means that a maximum of three other structural genes are located between the genes in question.

[0043] Preferred microorganisms display increased activity of the ferredoxin NAD(P)⁺ reductase AlkT and of a ferredoxin in comparison to its wild type.

[0044] It is preferable according to the invention that, if E₁ is an AlkB alkane hydroxylase of

EC 1.14.15.3, the microorganism according to the invention also displays increased activity of an AlkT rubredoxin NAD(P)⁺ reductase of EC 1.18.1.1 or of EC 1.18.1.4 and/or of a rubredoxin AlkG in comparison to its wild type. This has the technical effect that the activity of the AlkB alkane hydroxylase is raised and the product yields increased.
AlkT rubredoxin NAD(P)⁺ reductases of EC 1.18.1.1 or EC 1.18.1.4 catalyse the following reaction:
oxidized rubredoxin+NAD(P)H+H⁺=reduced rubredoxin+NAD(P)⁺ and are preferably encoded by a gene which is situated in direct proximity to a gene of an aforementioned AlkB alkane hydroxylase of EC 1.14.15.3 or of a rubredoxin AlkG described in connection with this invention.

[0045] The term “in direct proximity” means that a maximum of three other structural genes are located between the genes in question.

[0046] Rubredoxins AlkG catalyse the following reactions:

alkane monooxygenase+reduced rubredoxin+alkanoic acid (ester)=alkane monooxygenase+oxidized rubredoxin+ω-hydroxyalkanoic acid (ester)+H₂O, alkane monooxygenase+2 reduced rubredoxins+alkanoic acid (ester)=alkane monooxygenase+2 oxidized rubredoxins+ω-oxoalkanoic acid (ester)+2H₂O or
alkane monooxygenase+3 reduced rubredoxins+alkanoic acid (ester)=alkane monooxygenase+3 oxidized rubredoxins+ω-carboxyalkanoic acid (ester)+3H₂O and
are preferably encoded by a gene which is situated in direct proximity to a gene of an aforementioned AlkB alkane hydroxylase of EC 1.14.15.3 or an aforementioned AlkT rubredoxin NAD(P)⁺ reductase of EC 1.18.1.1 or EC 1.18.1.4. The term “in direct proximity” means that a maximum of three other structural genes are located between the genes in question.

[0047] Preferred microorganisms display increased activity of the AlkT rubredoxin NAD(P)⁺ reductase and of the rubredoxin AlkG in comparison to its wild type.

### Enzyme E₂ ω-Amination

[0048] It is preferable according to the invention to provide a microorganism which in particular is capable of producing ω-functionalized carboxylic acids and ω-functionalized carboxylate esters from at least one simple carbon source, where the ω-functionalization corresponds to an amino group, in particular primary, in the ω position. Thereby, the microorganisms can advantageously be used in processes for the production of ω-aminocarboxylic acids or ω-aminocarboxylate esters.

[0049] Hence microorganisms preferred according to the invention are characterized in that the second genetic modification additionally comprises that the microorganism displays increased activity of an enzyme E₂, which catalyses the conversion of ω-oxocarboxylic acids or ω-oxocarboxylate esters to the corresponding ω-aminocarboxylic acids or ω-aminocarboxylate esters, in comparison to its wild type.

[0050] According to the invention, the enzyme E₂ is preferably an ω-transaminase of EC 2.6.1.-.

[0051] As a measure of the enzyme activity E₂, the conversion of ω-oxolauric acid and/or methyl ω-oxolaurate to ω-aminolauric acid and/or methyl ω-aminolaurate can in particular be utilized.

[0052] Preferred enzymes E₂ are selected from the group:

3HMU_A, AAD41041.1, AAK15486.1, ABE03917.1, ADR60699.1, ADR61066.1, ADR62525.1, AEL07495.1, CAZ86955.1, EFW82310.1, EFW87681.1, EGC99983.1, EGD03176.1, EGE58369.1, EGH06681.1, EGH08331.1, EGH24301.1, EGH32343.1, EGH46412.1, EGH55033.1, EGH62152.1, EGH67339.1, EGH70821.1, EGH71404.1, EGH78772.1, EGH85312.1, EGH97105.1, EGP57596.1, NP_{—}102850.1, NP_{—}106560.1, NP_{—}248912.1, NP_{—}248990.1, NP_{—}354026.2, NP_{—}421926.1, NP_{—}637699.1, NP_{—}642792.1, NP_{—}744329.1, NP_{—}744732.1, NP_{—}747283.1, NP_{—}795039.1, NP_{—}901695.1 (encoded by SEQ ID No. 12), XP_{—}002943905.1, YP_{—}001021095.1, YP_{—}001059677.1, YP_{—}001061726.1, YP_{—}001066961.1, YP_{—}001074671.1, YP_{—}001120907.1, YP_{—}001140117.1, YP_{—}001170616.1, YP_{—}001185848.1, YP_{—}001188121.1, YP_{—}001233688.1, YP_{—}001268866.1, YP_{—}001270391.1, YP_{—}001345703.1, YP_{—}001412573.1, YP_{—}001417624.1, YP_{—}001526058.1, YP_{—}001579295.1, YP_{—}001581170.1, YP_{—}001668026.1, YP_{—}001669478.1, YP_{—}001671460.1, YP_{—}001685569.1, YP_{—}001747156.1, YP_{—}001749732.1, YP_{—}001765463.1, YP_{—}001766294.1, YP_{—}001790770.1, YP_{—}001808775.1, YP_{—}001809596.1, YP_{—}001859758.1, YP_{—}001888405.1, YP_{—}001903233.1, YP_{—}001977571.1, YP_{—}002229759.1, YP_{—}002231363.1, YP_{—}002280472.1, YP_{—}002297678.1, YP_{—}002543874.1, YP_{—}002549011.1, YP_{—}002796201.1, YP_{—}002801960.1, YP_{—}002875335.1, YP_{—}002897523.1, YP_{—}002912290.1, YP_{—}002974935.1, YP_{—}003060891.1, YP_{—}003264235.1, YP_{—}003552364.1, YP_{—}003578319.1, YP_{—}003591946.1, YP_{—}003607814.1, YP_{—}003641922.1, YP_{—}003674025.1, YP_{—}003692877.1, YP_{—}003755112.1, YP_{—}003896973.1, YP_{—}003907026.1, YP_{—}003912421.1, YP_{—}004086766.1, YP_{—}004142571.1, YP_{—}004147141.1, YP_{—}004228105.1, YP_{—}004278247.1, YP_{—}004305252.1, YP_{—}004356916.1, YP_{—}004361407.1, YP_{—}004378186.1, YP_{—}004379856.1, YP_{—}004390782.1, YP_{—}004472442.1, YP_{—}004590892.1, YP_{—}004612414.1, YP_{—}004676537.1, YP_{—}004693233.1, YP_{—}004701580.1, YP_{—}004701637.1, YP_{—}004704442.1, YP_{—}108931.1, YP_{—}110490.1, YP_{—}168667.1, YP_{—}237931.1, YP_{—}260624.1, YP_{—}262985.1, YP_{—}271307.1, YP_{—}276987.1, YP_{—}334171.1, YP_{—}337172.1, YP_{—}350660.1, YP_{—}351134.1, YP_{—}364386.1, YP_{—}366340.1, YP_{—}369710.1, YP_{—}370582.1, YP_{—}426342.1, YP_{—}440141.1, YP_{—}442361.1, YP_{—}468848.1, YP_{—}521636.1, YP_{—}554363.1, YP_{—}608454.1, YP_{—}610700.1, YP_{—}614980.1, YP_{—}622254.1, YP_{—}625753.1, YP_{—}680590.1, YP_{—}751687.1, YP_{—}767071.1, YP_{—}774090.1, YP_{—}774932.1, YP_{—}788372.1, YP_{—}858562.1, YP_{—}928515.1, YP_{—}983084.1, YP_{—}995622.1, ZP_{—}00948889.1, ZP_{—}00954344.1, ZP_{—}00959736.1, ZP_{—}00998881.1, ZP_{—}01011725.1, ZP_{—}01037109.1, ZP_{—}01058030.1, ZP_{—}01076707.1, ZP_{—}01103959.1, ZP_{—}01167926.1, ZP_{—}01224713.1, ZP_{—}01442907.1, ZP_{—}01446892.1, ZP_{—}01550953.1, ZP_{—}01625518.1, ZP_{—}01745731.1, ZP_{—}01750280.1, ZP_{—}01754305.1, ZP_{—}01763880.1, ZP_{—}01769626.1, ZP_{—}01865961.1, ZP_{—}01881393.1, ZP_{—}01901558.1, ZP_{—}02145337.1, ZP_{—}02151268.1, ZP_{—}02152332.1, ZP_{—}02167267.1, ZP_{—}02190082.1, ZP_{—}02242934.1, ZP_{—}02360937.1, ZP_{—}02367056.1, ZP_{—}02385477.1, ZP_{—}02456487.1, ZP_{—}02883670.1, ZP_{—}03263915.1, ZP_{—}03263990.1, ZP_{—}03400081.1, ZP_{—}03452573.1, ZP_{—}03456092.1, ZP_{—}03517291.1, ZP_{—}03529055.1, ZP_{—}03571515.1, ZP_{—}03572809.1, ZP_{—}03587785.1, ZP_{—}03588560.1, ZP_{—}03697266.1, ZP_{—}03697962.1, ZP_{—}04521092.1, ZP_{—}04590693.1, ZP_{—}04890914.1, ZP_{—}04891982.1, ZP_{—}04893793.1, ZP_{—}04902131.1, ZP_{—}04905327.1, ZP_{—}04941068.1, ZP_{—}04944536.1, ZP_{—}04945255.1, ZP_{—}04959332.1, ZP_{—}04964181.1, ZP_{—}05053721.1, ZP_{—}05063588.1, ZP_{—}05073059.1, ZP_{—}05077806.1, ZP_{—}05082750.1, ZP_{—}05091128.1, ZP_{—}05095488.1, ZP_{—}05101701.1, ZP_{—}05116783.1, ZP_{—}05121836.1, ZP_{—}05127756.1, ZP_{—}05637806.1, ZP_{—}05742087.1, ZP_{—}05783548.1, ZP_{—}05786246.1, ZP_{—}05843149.1, ZP_{—}05945960.1, ZP_{—}06459045.1, ZP_{—}06487195.1, ZP_{—}06492453.1, ZP_{—}06493162.1, ZP_{—}06703644.1, ZP_{—}06731146.1, ZP_{—}06839371.1, ZP_{—}07007312.1, ZP_{—}07266194.1, ZP_{—}07374050.1, ZP_{—}07662787.1, ZP_{—}07778196.1, ZP_{—}07797983.1, ZP_{—}08099459.1, ZP_{—}08138203.1, ZP_{—}08141719.1, ZP_{—}08142973.1, ZP_{—}08177102.1, ZP_{—}08185821.1, ZP_{—}08186468.1, ZP_{—}08208888.1, ZP_{—}08266590.1, ZP_{—}08402041.1, ZP_{—}08406891.1, ZP_{—}08522175.1, ZP_{—}08527488.1, ZP_{—}08631252.1, ZP_{—}08636687.1, SEQ ID No. 08, SEQ ID No. 09
in particular NP_{—}901695.1 (encoded by SEQ ID No. 12), ZP_{—}03697266.1, AAD41041.1, YP_{—}002796201.1, ZP_{—}03697962.1, YP_{—}001859758.1, YP_{—}002229759.1, YP_{—}001120907.1, YP_{—}110490.1, ZP_{—}04964181.1, YP_{—}774932.1, YP_{—}001766294.1, YP_{—}001581170.1, YP_{—}622254.1, ZP_{—}03588560.1, YP_{—}001809596.1, YP_{—}370582.1, ZP_{—}03572809.1, NP_{—}248990.1, YP_{—}001888405.1, ZP_{—}04905327.1, YP_{—}001061726.1, YP_{—}001668026.1, ZP_{—}01750280.1, ZP_{—}07778196.1, EGH71404.1, NP_{—}744329.1, YP_{—}004147141.1, ADR61066.1, ZP_{—}05783548.1, YP_{—}004701637.1, YP_{—}366340.1, YP_{—}003264235.1, EGD03176.1, YP_{—}001268866.1, ZP_{—}01901558.1, ZP_{—}05121836.1, YP_{—}003692877.1, ZP_{—}03517291.1, YP_{—}002974935.1, YP_{—}001668026.1, ADR61066.1, NP_{—}744329.1, YP_{—}001268866.1, YP_{—}004701637.1, ZP_{—}08142973.1, ADR62525.1, YP_{—}610700.1, NP_{—}747283.1, ADR62525.1, YP_{—}001270391.1, YP_{—}004704442.1, YP_{—}610700.1, YP_{—}001747156.1, ZP_{—}08138203.1, ZP_{—}07266194.1, EGH70821.1, YP_{—}351134.1, EGH32343.1, EGH08331.1, EGH67339.1, YP_{—}001668026.1, YP_{—}004701637.1, YP_{—}237931.1, ZP_{—}03400081.1, ZP_{—}05116783.1, ZP_{—}01550953.1, ZP_{—}07662787.1, YP_{—}928515.1, YP_{—}788372.1, YP_{—}001021095.1, ZP_{—}07797983.1, YP_{—}003578319.1, YP_{—}004305252.1, NP_{—}248912.1, ZP_{—}08636687.1, YP_{—}003912421.1, YP_{—}751687.1, ZP_{—}08142973.1, YP_{—}271307.1, ZP_{—}05082750.1, YP_{—}001417624.1, YP_{—}353455.1, SEQ ID No. 08, SEQ ID No. 09 and particularly preferably NP_{—}901695.1 (encoded by SEQ ID No. 12), YP_{—}353455.1, SEQ ID No. 08 and SEQ ID No. 09
and
proteins with a polypeptide sequence wherein up to 60%, preferably up to 25%, particularly preferably up to 15%, in particular up to 10, 9, 8, 7, 6, 5, 4, 3, 2 or 1% of the amino acid residues compared to the aforementioned reference sequences are modified by deletion, insertion, substitution or a combination thereof and which still possess at least 50%, preferably 65%, particularly preferably 80%, in particular more than 90% of the activity of the protein with the corresponding, aforementioned reference sequence, wherein 100% activity of the reference protein is understood to mean the increasing of the activity of the cells used as a biocatalyst, i.e. the quantity of substance converted per unit time based on the cell quantity used (units per gram cell dry weight [U/g CDW]) in comparison to the activity of the biocatalyst in the absence of the reference protein, wherein the activity in this connection and in connection with the determination of the activity of the enzyme E₂ in general is understood to mean in particular the conversion of ω-oxolauric acid and/or methyl ω-oxolaurate to ω-aminolauric acid and/or methyl ω-aminolaurate.

[0053] A microorganism according to the invention with increased activity of an enzyme E₂ in comparison to its wild type advantageously displays in comparison to its wild type decreased activity of an aldehyde dehydrogenase of EC 1.2.1.3, EC 1.2.1.4 or EC 1.2.1.5, which catalyses the following reaction:

ω-oxoalkanoic acid (ester)+NAD(P)⁺=ω-carboxyalkanoic acid (ester)+NAD(P)H+ H⁺ Such aldehyde dehydrogenases are in particular those which are listed below as specific E₅, and those which are listed below as preferred E₄ fatty alcohol oxidases of EC 1.1.3.20, AlkJ alcohol dehydrogenases of EC 1.1.99.- and alcohol dehydrogenases of EC 1.1.1.1 or EC 1.1.1.2 and catalyse at least the second of the two reactions mentioned there; such enzymes are also described below as enzymes E_{4*}.

[0054] This has the technical effect that depletion of the ω-oxocarboxylic acid or the ω-oxocarboxylate ester to be aminated is prevented and hence more substrate is available for the ω-aminocarboxylic acid or ω-aminocarboxylate ester product formation.

[0055] The wording “in comparison to its wild type, decreased activity” is preferably understood to mean activity decreased by at least 50%, particularly preferably by at least 90%, more preferably by at least 99.9%, still more preferably by at least 99.99% and most preferably by at least 99.999% based on the wild type activity. The wording “decreased activity” also includes no detectable activity (“activity of nil”). The reduction of the activity of a specific enzyme can for example be effected by targetted mutation or by other measures known to those skilled in the art for reducing the activity of a specific enzyme. Further processes for reducing enzymatic activities in microorganisms are known to those skilled in the art. Molecular biological techniques in particular are suitable here. Those skilled in the art will find instructions for the modification and reduction of protein expression and enzymatic activity reduction associated therewith for Candida, in particular for interruption of specific genes in WO91/006660 and WO03/100013.

[0056] Microorganisms preferred according to the invention are characterized in that the reduction of the enzymatic activity is achieved by modification of a gene comprising a nucleic acid sequence coding for the aforementioned enzymes, wherein the modification is selected from the group comprising, preferably consisting of, insertion of foreign DNA into the gene, deletion at least of parts of the gene, point mutations in the gene sequence, RNA interference (siRNA), antisense RNA or modification (insertion, deletion or point mutations) of regulatory sequences which flank the gene. In this connection, foreign DNA should be understood to mean any DNA sequence which is “foreign” to the gene (and not to the organism). In this connection, it is particularly preferable that the gene is interrupted by insertion of a selection marker gene, so that the foreign DNA is a selection marker gene, wherein the insertion was preferably effected by homologous recombination into the gene locus. In this connection, it can be advantageous if the selection marker gene is extended with further functionalities which in turn enable subsequent removal from the gene. This can for example be achieved by recombination systems foreign to the organism, such as for example a Cre/loxP system or FRT (Flippase Recognition Target) system or the recombination system intrinsic to the organism.

[0057] The reduction of the activity of the microorganism according to the invention in comparison to its wild type is determined according to methods described above for the determination of the activity with use of as far as possible equal cell counts/concentrations, wherein the cells have been grown under the same conditions such as for example medium, gassing and stirring.

### Enzyme E₃ Cofactor Recycling ω-Amination

[0058] For the production of an ω-amino-functionalized carboxylic acid or an ω-amino-functionalized carboxylate ester it can be advantageous if the second genetic modification comprises increased activity of an enzyme E₃ which catalyses the conversion of an α-ketocarboxylic acid to an amino acid. Preferably the enzyme E₃ is an amino acid dehydrogenase, such as for example serine dehydrogenases, aspartate dehydrogenases, phenylalanine dehydrogenases and glutamate dehydrogenases, particularly preferably an alanine dehydrogenase of EC 1.4.1.1.

[0059] Such preferable alanine dehydrogenases are selected from

EGR93259.1, YP_{—}004743277.1, YP_{—}004741620.1, YP_{—}004737294.1, YP_{—}002509853.1, YP_{—}002492255.1, YP_{—}002489845.1, YP_{—}002481919.1, YP_{—}001819330.1, YP_{—}004728333.1, ZP_{—}08670930.1, YP_{—}004672392.1, YP_{—}004467026.1, YP_{—}004326214.1, YP_{—}002349951.1, YP_{—}001674437.1, YP_{—}003921585.1, YP_{—}001699731.1, YP_{—}004720756.1, YP_{—}004719515.1, EGQ22316.1, EGQ21760.1, YP_{—}004689232.1, YP_{—}004698526.1, YP_{—}004694875.1, EGP67576.1, YP_{—}001832691.1, YP_{—}001760857.1, AEJ53875.1, AEJ42949.1, YP_{—}004392931.1, YP_{—}004404798.1, YP_{—}004374160.1, YP_{—}004303162.1, YP_{—}004196134.1, YP_{—}004178581.1, YP_{—}004163857.1, YP_{—}004161555.1, YP_{—}004099081.1, YP_{—}004101986.1, YP_{—}004042336.1, YP_{—}003994181.1, YP_{—}003966543.1, YP_{—}003913256.1, YP_{—}003825828.1, YP_{—}003806106.1, YP_{—}003686355.1, YP_{—}003678575.1, YP_{—}003654745.1, YP_{—}003651439.1, YP_{—}003637111.1, YP_{—}003631815.1, YP_{—}003300711.1, YP_{—}002886396.1, ZP_{—}03493991.1, YP_{—}001890813.1, YP_{—}001888849.1, YP_{—}001554753.1, YP_{—}001529018.1, YP_{—}001528954.1, YP_{—}001502090.1, YP_{—}001412833.1, YP_{—}001363812.1, YP_{—}923679.1, NP_{—}440110.1, ZP_{—}08640273.1, ZP_{—}08639751.1, ZP_{—}08637916.1, YP_{—}004171395.1, YP_{—}001366419.1, YP_{—}001327051.1, YP_{—}001262560.1, YP_{—}886996.1, YP_{—}882850.1, YP_{—}704410.1, YP_{—}703508.1, ZP_{—}08624689.1, YP_{—}001230376.1, P17557.1, P17556.1, CCB94892.1, CCB73698.1, YP_{—}001168635.1, YP_{—}004668736.1, YP_{—}911378.1, YP_{—}003686997.1, YP_{—}002263235.1, NP_{—}820115.1, YP_{—}004653761.1, YP_{—}004651159.1, YP_{—}003869397.1, YP_{—}004641708.1, YP_{—}004641134.1, YP_{—}001996597.1, YP_{—}001998297.1, YP_{—}001943676.1, YP_{—}001810799.1, YP_{—}004630087.1, YP_{—}004621893.1, YP_{—}004613083.1, ZP_{—}08621144.1, YP_{—}003954200.1, YP_{—}001372688.1, YP_{—}001233686.1, ZP_{—}08594848.1, ZP_{—}08586665.1, ZP_{—}08578896.1, ZP_{—}08575937.1, YP_{—}004604438.1, YP_{—}004600931.1, ZP_{—}08569139.1, ZP_{—}08566255.1, AEB25326.1, YP_{—}374584.1, YP_{—}004216732.1, ZP_{—}06806151.1, ZP_{—}06440291.1, ZP_{—}06369993.1, ZP_{—}06254238.1, ZP_{—}05844252.1, ZP_{—}05472927.1, ZP_{—}05365401.1, ZP_{—}04747945.1, ZP_{—}04678933.1, ZP_{—}03779761.1, ZP_{—}03728859.1, ZP_{—}03711891.1, ZP_{—}03697269.1, ZP_{—}01628294.1, ZP_{—}01546224.1, ZP_{—}01444021.1, ZP_{—}01308570.1, ZP_{—}01228194.1, ZP_{—}01164841.1, ZP_{—}01114638.1, YP_{—}004566582.1, YP_{—}004572166.1, YP_{—}004571401.1, YP_{—}004569425.1, YP_{—}003513168.1, YP_{—}004561169.1, ZP_{—}08554945.1, YP_{—}400777.1, ZP_{—}08533479.1, ZP_{—}08533412.1, ZP_{—}08525779.1, ZP_{—}08523693.1, YP_{—}004471329.1, YP_{—}004368103.1, YP_{—}001536790.1, YP_{—}001158763.1, YP_{—}662032.1, YP_{—}967824.1, YP_{—}004542206.1, YP_{—}002958019.1, YP_{—}645630.1, ZP_{—}08520595.1, AEG81976.1, YP_{—}002560779.1, YP_{—}496956.1, YP_{—}411850.1, YP_{—}300065.1, NP_{—}840123.1, ZP_{—}08514775.1, YP_{—}002250769.1, YP_{—}002155665.1, YP_{—}002137991.1, YP_{—}001135275.1, YP_{—}001070365.1, YP_{—}639268.1, NP_{—}864377.1, YP_{—}004554709.1, YP_{—}004546384.1, YP_{—}004544159.1, ZP_{—}01448725.1, ZP_{—}01255407.1, EGL88594.1, EGL87587.1, YP_{—}004536059.1, ZP_{—}08512666.1, ZP_{—}08501410.1, ZP_{—}08493566.1, ZP_{—}08486369.1, YP_{—}004497891.1, YP_{—}004494473.1, YP_{—}003945301.1, YP_{—}003835539.1, YP_{—}003634898.1, YP_{—}003503876.1, ZP_{—}06503131.1, YP_{—}003376450.1, YP_{—}003409976.1, YP_{—}003409004.1, YP_{—}003395275.1, YP_{—}003393138.1, YP_{—}003387714.1, YP_{—}003382934.1, ZP_{—}05760008.1, ZP_{—}05300490.1, ZP_{—}04387987.1, ZP_{—}03725713.1, YP_{—}002134125.1, YP_{—}001618802.1, ZP_{—}01899015.1, ZP_{—}01881250.1, ZP_{—}01731833.1, YP_{—}004529602.1, YP_{—}004512974.1, YP_{—}004479110.1, YP_{—}004434722.1, YP_{—}004430602.1, CBX28458.1, ZP_{—}05217624.1, ZP_{—}01074124.1, ZP_{—}01062209.1, ZP_{—}01011939.1, ZP_{—}00956754.1, YP_{—}388045.1, ZP_{—}07910902.1, ZP_{—}07835291.1, ZP_{—}07831081.1, ZP_{—}07704117.1, ZP_{—}07112933.1, ZP_{—}06860168.1, ZP_{—}05915689.1, YP_{—}002352943.1, YP_{—}826544.1, YP_{—}004087624.1, ADP99134.1, YP_{—}003590847.1, YP_{—}003589189.1, YP_{—}001192379.1, ZP_{—}08473868.1, ZP_{—}08469833.1, ZP_{—}08462614.1, ZP_{—}07709417.1, ZP_{—}07672507.1, ZP_{—}07608107.1, ZP_{—}07404685.1, ZP_{—}07334010.1, ZP_{—}07333254.1, ZP_{—}06888732.1, ZP_{—}06837313.1, YP_{—}873046.1, YP_{—}004060177.1, YP_{—}004007860.1, YP_{—}003492711.1, ZP_{—}08456143.1, YP_{—}003675989.1, YP_{—}003159562.1, NP_{—}302068.1, YP_{—}004461013.1, ZP_{—}08426378.1, ZP_{—}08422563.1, YP_{—}004122643.1, YP_{—}004077807.1, YP_{—}004058618.1, YP_{—}004055696.1, YP_{—}003898888.1, YP_{—}003575339.1, ZP_{—}06186049.1, YP_{—}003314861.1, YP_{—}003148148.1, YP_{—}002786543.1, YP_{—}001661762.1, YP_{—}001666058.1, YP_{—}001549204.1, YP_{—}001518627.1, YP_{—}004453289.1, YP_{—}004450492.1, YP_{—}004301609.1, YP_{—}465316.1, ZP_{—}08411512.1, YP_{—}001394062.1, YP_{—}001035553.1, YP_{—}417038.1, YP_{—}301147.1, YP_{—}014199.1, EGJ45059.1, EGJ36821.1, EGJ36552.1, EGJ19019.1, ZP_{—}08388916.1, YP_{—}004427278.1, YP_{—}003909234.1, YP_{—}002536659.1, YP_{—}001940410.1, YP_{—}001329977.1, YP_{—}001323343.1, YP_{—}001114195.1, YP_{—}001096594.1, YP_{—}949547.1, YP_{—}756289.1, YP_{—}722774.1, YP_{—}525283.1, YP_{—}461225.1, YP_{—}320697.1, YP_{—}289022.1, YP_{—}075651.1, NP_{—}988633.1, YP_{—}004399762.1, YP_{—}004335185.1, ADX76365.1, YP_{—}004203407.1, YP_{—}001917832.1, YP_{—}001642542.1, ZP_{—}08332142.1, YP_{—}041174.1, ZP_{—}08328264.1, YP_{—}004225082.1, EGG96712.1, ZP_{—}08311476.1, ZP_{—}08310170.1, ZP_{—}08267322.1, ZP_{—}08263846.1, ZP_{—}07898723.1, YP_{—}003273311.1, ZP_{—}05909597.1, YP_{—}003073095.1, YP_{—}003022905.1, YP_{—}003013384.1, YP_{—}003011072.1, ZP_{—}04777180.1, ZP_{—}04432601.1, YP_{—}001016505.1, YP_{—}953175.1, YP_{—}731492.1, ZP_{—}08302086.1, ZP_{—}08296718.1, ZP_{—}08285373.1, ZP_{—}08280138.1, ZP_{—}08270040.1, ZP_{—}08261780.1, ZP_{—}08258406.1, ZP_{—}08246570.1, YP_{—}003113209.1, YP_{—}002436565.1, ZP_{—}04409790.1, YP_{—}428767.1, EGG40837.1, CCA54694.1, YP_{—}004147180.1, YP_{—}550034.1, YP_{—}173042.1, EGF75662.1, YP_{—}004205024.1, YP_{—}003670363.1, YP_{—}003476027.1, YP_{—}003241464.1, YP_{—}863990.1, YP_{—}004149630.1, YP_{—}003646700.1, EGF24326.1, BAK15593.1, YP_{—}003991014.1, YP_{—}003988127.1, YP_{—}003722297.1, YP_{—}003254539.1, YP_{—}003251916.1, NP_{—}901692.1, EGF16043.1, EGF07290.1, YP_{—}003048854.1, YP_{—}149301.1, YP_{—}148605.1, YP_{—}004340432.1, EFT09946.1, EFS80513.1, EFS51332.1, EFS42459.1, YP_{—}003060895.1, YP_{—}003059033.1, ZP_{—}03305373.1, YP_{—}002379520.1, YP_{—}372555.1, NP_{—}085655.1, YP_{—}004321492.1, ZP_{—}08239446.1, YP_{—}003817108.1, YP_{—}002951286.1, YP_{—}002950656.1, YP_{—}002522266.1, YP_{—}001982538.1, YP_{—}001127463.1, YP_{—}001126767.1, NP_{—}764939.1, NP_{—}761756.1, NP_{—}244046.1, NP_{—}243195.1, YP_{—}003194671.1, YP_{—}003161559.1, YP_{—}002797803.1, YP_{—}002634404.1, YP_{—}439119.1, YP_{—}314402.1, YP_{—}143482.1, NP_{—}295618.1, ZP_{—}08215173.1, YP_{—}004282846.1, YP_{—}004267961.1, YP_{—}001867313.1, YP_{—}001301882.1, YP_{—}847214.1, YP_{—}004095847.1, YP_{—}003338282.1, YP_{—}003337256.1, YP_{—}355846.1, YP_{—}253131.1, ZP_{—}08197563.1, ZP_{—}08196283.1, ADW06447.1, YP_{—}003370508.1, YP_{—}003317645.1, YP_{—}003184411.1, YP_{—}003198349.1, YP_{—}003084639.1, YP_{—}004294565.1, YP_{—}004243057.1, CBZ55377.1, EGC26795.1, EGC25718.1, EGC23378.1, ZP_{—}07887872.1, YP_{—}003269716.1, YP_{—}003203632.1, YP_{—}003199972.1, YP_{—}003153148.1, YP_{—}003146304.1, YP_{—}002893498.1, ZP_{—}03230841.1, ZP_{—}03229411.1, YP_{—}001050520.1, YP_{—}963387.1, YP_{—}927645.1, YP_{—}869684.1, YP_{—}734091.1, NP_{—}372233.1, NP_{—}102173.1, ZP_{—}08170259.1, EGD36706.1, EGD32748.1, ZP_{—}08155540.1, YP_{—}004142849.1, YP_{—}002417649.1, YP_{—}001301040.1, YP_{—}001211208.1, YP_{—}266230.1, ZP_{—}08145165.1, YP_{—}001801454.1, YP_{—}001736003.1, YP_{—}833487.1, YP_{—}831236.1, YP_{—}384064.1, YP_{—}094958.1, YP_{—}009793.1, NP_{—}975075.1, NP_{—}847074.1, EGC82166.1, YP_{—}004261609.1, YP_{—}004255502.1, YP_{—}678603.1, YP_{—}004181700.1, ZP_{—}08122013.1, ADT87541.1, YP_{—}003524764.1, YP_{—}002992990.1, YP_{—}002992892.1, YP_{—}081348.1, YP_{—}080482.1, YP_{—}002476349.1, ZP_{—}08115025.1, ZP_{—}08114403.1, YP_{—}003552869.1, YP_{—}002358112.1, ZP_{—}08111138.1, YP_{—}003770046.1, YP_{—}003103898.1, ZP_{—}08101069.1, ZP_{—}08097706.1, ZP_{—}08094005.1, YP_{—}003167240.1, YP_{—}002371817.1, YP_{—}004231854.1, EGA98455.1, YP_{—}002430239.1, ZP_{—}01049900.1, NP_{—}769819.1, NP_{—}768378.1, YP_{—}001143837.1, YP_{—}001108475.1, YP_{—}906040.1, YP_{—}726477.1, YP_{—}575010.1, YP_{—}477594.1, YP_{—}474564.1, YP_{—}130399.1, YP_{—}129373.1, YP_{—}123314.1, NP_{—}810467.1, NP_{—}646469.1, NP_{—}626044.1, NP_{—}391071.1 (encoded by SEQ ID No. 11), ZP_{—}08086822.1, ZP_{—}08084776.1, ZP_{—}08083119.1, NP_{—}465104.1, NP_{—}374819.1, NP_{—}337355.1, NP_{—}217296.1, ZP_{—}08072064.1, YP_{—}004197762.1, ZP_{—}08065558.1, ZP_{—}08063535.1, ZP_{—}08061612.1, ZP_{—}08059482.1, ZP_{—}08057644.1, ZP_{—}08055701.1, ZP_{—}08049025.1, ZP_{—}08047015.1, ZP_{—}04062925.1, YP_{—}269473.1, ZP_{—}08033402.1, ZP_{—}07829339.1, ZP_{—}06603053.1, ZP_{—}08020768.1, ZP_{—}08013590.1, ZP_{—}08011832.1, YP_{—}003783744.1, YP_{—}002781576.1, YP_{—}002780533.1, ZP_{—}02195873.1, NP_{—}797482.1, ZP_{—}08006697.1, ZP_{—}08006365.1, ZP_{—}08005962.1, ZP_{—}08004522.1, EFV89241.1, ZP_{—}07980135.1, ZP_{—}07974222.1, ZP_{—}07970379.1, ZP_{—}07962751.1, ZP_{—}07953732.1, ZP_{—}07945354.1, ZP_{—}06273519.1, YP_{—}003428808.1, YP_{—}003426902.1, YP_{—}001711555.1, YP_{—}001703831.1, YP_{—}001621081.1, YP_{—}001223643.1, YP_{—}001228127.1, YP_{—}849789.1, YP_{—}759696.1, NP_{—}969291.1, NP_{—}896596.1, NP_{—}470950.1, YP_{—}359521.1, ZP_{—}01946735.1, ZP_{—}03631968.1, ZP_{—}01101833.1, YP_{—}002826017.1, YP_{—}003796926.1, ZP_{—}07873974.1, ZP_{—}07870908.1, ZP_{—}07645051.1, ZP_{—}07643260.1, ZP_{—}06611917.1, AAT40119.1, ZP_{—}07864946.1, YP_{—}004068409.1, YP_{—}002796203.1, YP_{—}002774420.1, YP_{—}003600348.1, YP_{—}003599946.1, YP_{—}003565624.1, YP_{—}003565223.1, YP_{—}335198.1, YP_{—}423850.1, YP_{—}155059.1, ZP_{—}07843538.1, ZP_{—}07841226.1, ZP_{—}03566837.1, EFS39373.1, EFS35044.1, ZP_{—}05287373.1, ZP_{—}05280407.1, ZP_{—}05224249.1, ZP_{—}04701236.1, ZP_{—}04692180.1, ZP_{—}03561728.1, ZP_{—}03227314.1, ZP_{—}02931419.1, ZP_{—}02731551.1, ZP_{—}02465413.1, ZP_{—}02451335.1, ZP_{—}02384332.1, ZP_{—}02381808.1, ZP_{—}02330643.1, YP_{—}004047600.1, EFR99988.1, EFR93766.1, EFR90643.1, EFR84459.1, ZP_{—}04059923.1, ZP_{—}03613601.1, ZP_{—}07743242.1, ZP_{—}07740118.1, ZP_{—}07728760.1, ZP_{—}07728640.1, YP_{—}003557047.1, ZP_{—}07204792.1, ZP_{—}07033145.1, ZP_{—}06949396.1, ZP_{—}06928932.1, ZP_{—}05692073.1, ZP_{—}05687006.1, ZP_{—}04867480.1, YP_{—}775531.1, CBE70214.1, ZP_{—}07721182.1, CBW22027.1, BAJ31519.1, ZP_{—}07694389.1, ZP_{—}07653390.1, ZP_{—}07548028.1, ZP_{—}07547185.1, ZP_{—}07462497.1, ZP_{—}07458778.1, ZP_{—}07399459.1, ZP_{—}07397253.1, ZP_{—}07397250.1, ZP_{—}07390390.1, ZP_{—}07390003.1, ZP_{—}07388675.1, ZP_{—}07367724.1, ZP_{—}07206561.1, ZP_{—}07053170.1, ZP_{—}07048770.1, ZP_{—}06873224.1, ZP_{—}06852862.1, ZP_{—}06427630.1, ZP_{—}06307332.1, ZP_{—}06252577.1, ZP_{—}06175164.1, ZP_{—}06080808.1, ZP_{—}06052314.1, ZP_{—}06033748.1, ZP_{—}05945907.1, ZP_{—}05924840.1, ZP_{—}05885109.1, ZP_{—}05882095.1, ZP_{—}05877865.1, ZP_{—}05855512.1, ZP_{—}05745159.1, ZP_{—}05716384.1, ZPO4866524.1, ZP_{—}04819572.1, ZP_{—}04797418.1, ZPO4319784.1, ZP_{—}04302850.1, ZP_{—}04298961.1, ZP_{—}04287684.1, ZP_{—}04277177.1, ZP_{—}04248389.1, ZP_{—}04235899.1, ZP_{—}04230016.1, ZP_{—}04226233.1, ZP_{—}04219330.1, ZP_{—}04216141.1, ZP_{—}04209092.1, ZP_{—}04188247.1, ZP_{—}04184510.1, ZP_{—}04176651.1, ZP_{—}04172877.1, ZP_{—}04170954.1, ZP_{—}04166021.1, ZP_{—}04160852.1, ZP_{—}04158983.1, ZP_{—}04154769.1, ZP_{—}04153266.1, ZP_{—}04149717.1, ZP_{—}04122524.1, ZP_{—}04110635.1, ZP_{—}04109769.1, ZP_{—}04109049.1, ZPO4108444.1, ZP_{—}04104350.1, ZP_{—}04100460.1, ZP_{—}04075249.1, ZP_{—}04074263.1, ZP_{—}04009917.1, ZP_{—}03916440.1, ZP_{—}03703407.1, ZP_{—}03675960.1, ZP_{—}03588177.1, ZP_{—}03569636.1, ZP_{—}03497916.1, ZP_{—}03459468.1, ZP_{—}03299979.1, ZP_{—}03127493.1, ZP_{—}03054334.1, ZP_{—}03015779.1, ZP_{—}02478038.1, ZP_{—}02434435.1, ZP_{—}01891777.1, ZP_{—}01134782.1, ZP_{—}01084087.1, ZP_{—}00959435.1, ZP_{—}06021901.1, ZP_{—}02908521.1, ZP_{—}02892318.1, ZP_{—}02883918.1, ZP_{—}02433787.1, ZP_{—}02428013.1, ZP_{—}02424229.1, ZP_{—}02420399.1, ZP_{—}02190089.1, ZP_{—}02184200.1, ZP_{—}02166566.1, ZP_{—}02159718.1, ZP_{—}02152178.1, ZP_{—}02147727.1, ZP_{—}02144676.1, ZP_{—}02078507.1, ZP_{—}02072824.1, ZP_{—}02067293.1, ZP_{—}02061844.1, ZP_{—}01996280.1, ZP_{—}01991915.1, ZP_{—}01958087.1, ZP_{—}01908911.1, ZP_{—}01901606.1, ZP_{—}01895406.1, ZP_{—}01872936.1, ZP_{—}01870578.1, ZP_{—}01863314.1, ZP_{—}01859623.1, ZP_{—}01852574.1, ZP_{—}01834861.1, ZP_{—}01816459.1, ZP_{—}01770050.1, ZP_{—}01754550.1, ZP_{—}01750331.1, ZP_{—}01746097.1, ZP_{—}01736276.1, ZP_{—}01723571.1, ZP_{—}01688551.1, ZP_{—}01666824.1, ZP_{—}01627178.1, ZP_{—}01623088.1, ZP_{—}01612926.1, ZP_{—}01470938.1, ZP_{—}01460341.1, ZP_{—}01452344.1, ZP_{—}01439206.1, ZP_{—}01386817.1, ZP_{—}01313561.1, ZP_{—}01304248.1, ZP_{—}01264036.1, ZP_{—}01261877.1, ZP_{—}01235013.1, ZP_{—}01233072.1, ZP_{—}01224625.1, ZP_{—}01223017.1, ZP_{—}01221216.1, ZP_{—}01215557.1, ZP_{—}01202668.1, ZP_{—}01159834.1, ZP_{—}01158968.1, ZP_{—}01157579.1, ZP_{—}01130649.1, ZP_{—}01126987.1, ZP_{—}01122900.1, ZP_{—}01118752.1, ZP_{—}01090470.1, ZP_{—}01067027.1, ZP_{—}01058751.1, ZP_{—}01043459.1, ZP_{—}01041526.1, ZP_{—}01036767.1, ZP_{—}01001935.1, ZP_{—}00995212.1, ZP_{—}00992904.1, ZP_{—}00962062.1, ZP_{—}00952239.1, ZP_{—}00741173.1, ZP_{—}00740055.1, ZP_{—}00738801.1, ZP_{—}00517716.1, ZP_{—}00231205.1, ZP_{—}00208007.1, YP_{—}003974610.1, YP_{—}003546595.1, YP_{—}002317127.1, ZP_{—}07313778.1, ZP_{—}07302778.1, ZP_{—}07298850.1, ZP_{—}07285992.1, ZP_{—}07282306.1, ZP_{—}07279420.1, ZP_{—}07270582.1, ZP_{—}07001670.1, YP_{—}003706150.1, ZP_{—}06916083.1, ZP_{—}06912607.1, ZP_{—}06707160.1, ZP_{—}06324727.1, ZP_{—}06199155.1, ZP_{—}06197322.1, ZP_{—}05788488.1, ZP_{—}05785587.1, ZP_{—}05779471.1, ZP_{—}05739072.1, ZP_{—}05649780.1, ZP_{—}05647025.1, ZP_{—}05546023.1, ZP_{—}05341228.1, ZP_{—}05256588.1, ZP_{—}05127284.1, ZP_{—}05121710.1, ZP_{—}05119732.1, ZP_{—}05105668.1, ZP_{—}05101668.1, ZP_{—}05095370.1, ZP_{—}05090860.1, ZP_{—}05080646.1, ZP_{—}05076859.1, ZP_{—}05069222.1, ZP_{—}05065142.1, ZP_{—}05056378.1, ZP_{—}05052029.1, ZP_{—}05046506.1, ZP_{—}05037402.1, ZP_{—}05033610.1, ZP_{—}05026858.1, ZP_{—}05001187.1, ZP_{—}04959306.1, ZP_{—}04947229.1, ZP_{—}04941878.1, ZP_{—}04896669.1, ZP_{—}04890139.1, ZP_{—}04852481.1, ZP_{—}04849996.1, ZP_{—}04608704.1, ZP_{—}04581931.1, ZP_{—}04555275.1, ZP_{—}04553607.1, ZP_{—}04545440.1, ZP_{—}04538537.1, YP_{—}002311919.1, ZP_{—}01052096.1, YP_{—}432286.1, ZP_{—}07039851.1, ZP_{—}07036831.1, ZP_{—}07035634.1, ZP_{—}06826623.1, ZP_{—}06202690.1, ZP_{—}06091438.1, ZP_{—}06060476.1, YP_{—}002955941.1, YP_{—}002764322.1, YP_{—}002761274.1, YP_{—}002754767.1, YP_{—}002605829.1, YP_{—}002544281.1, YP_{—}002453687.1, YP_{—}002444060.1, YP_{—}002369417.1, YP_{—}002365390.1, YP_{—}002297006.1, YP_{—}002233968.1, YP_{—}001861152.1, YP_{—}001850232.1, YP_{—}001827236.1, YP_{—}001815332.1, YP_{—}001661116.1, YP_{—}001647239.1, YP_{—}001643400.1, YP_{—}001625970.1, YP_{—}001584357.1, YP_{—}001488077.1, YP_{—}001473862.1, YP_{—}001450010.1, YP_{—}001444991.1, YP_{—}001424576.1, YP_{—}001422460.1, YP_{—}001376512.1, YP_{—}001373857.1, YP_{—}001217438.1, YP_{—}001155448.1, YP_{—}001117213.1, YP_{—}001094151.1, YP_{—}950353.1, YP_{—}949946.1, YP_{—}944887.1, YP_{—}854776.1, YP_{—}837848.1, YP_{—}795217.1, YP_{—}750481.1, YP_{—}746463.1, YP_{—}681383.1, YP_{—}673989.1, YP_{—}632321.1, YP_{—}624008.1, YP_{—}615612.1, YP_{—}611857.1, YP_{—}604242.1, YP_{—}562748.1, YP_{—}536656.1, YP_{—}517218.1, YP_{—}459264.1, YP_{—}382475.1, YP_{—}340233.1, YP_{—}295387.1, YP_{—}285355.1, YP_{—}204286.1, YP_{—}174267.1, YP_{—}165491.1, YP_{—}126314.1, YP_{—}111103.1, YP_{—}098760.1, YP_{—}082111.1, YP_{—}064280.1, YP_{—}064276.1, YP_{—}062161.1, YP_{—}056928.1, YP_{—}008485.1, YP_{—}005739.1, NP_{—}961822.1, NP_{—}953341.1, NP_{—}926915.1, NP_{—}875991.1, NP_{—}834329.1, NP_{—}830409.1, NP_{—}827683.1, NP_{—}694147.1, NP_{—}693109.1, NP_{—}682897.1, NP_{—}661601.1, NP_{—}621858.1, NP_{—}486395.1, NP_{—}385730.1, NP_{—}231539.1, ADL65712.1, XP_{—}003087064.1, YP_{—}003886520.1, YP_{—}003699559.1, YP_{—}003516134.1, ADI98200.1, BAI86717.1, YP_{—}003794343.1, YP_{—}003790454.1, ADI11356.1, YP_{—}003845821.1, ADK69870.1, YP_{—}003784546.1, CBW36497.1, CBW26165.1, YP_{—}003709979.1, CAQ50186.1, ZP_{—}06770463.1, CBK69442.1, YP_{—}003413835.1, YP_{—}003595089.1, ZP_{—}06807811.1, YP_{—}003582455.1, YP_{—}003464731.1, YP_{—}003496397.1, YP_{—}003421918.1, CBL07274.1, CBK64956.1, YP_{—}003508515.1, AAL87460.1, AAC23579.1, AAC23578.1, AAC23577.1, ACU78652.1, YP_{—}003471439.1, YP_{—}003452777.1, ZP_{—}06384971.1, ACY25368.1, ABC26869.1, AAP44334.1, EEZ80018.1, ZP_{—}05110458.1, 1PJB_A, ZP_{—}04717201.1, ZP_{—}04689103.1, ZP_{—}04658071.1, XP_{—}002364705.1, ACN89388.1, 2VHW_A, 2VHV_A, XP_{—}001324625.1, ABZ06259.1, ABR57171.1, CAO90307.1, CAM75354.1, CAA44791.1, BAA77513.1, EGR96638.1, EGR94699.1, ZP_{—}08693646.1, YP_{—}004740306.1, YP_{—}004738947.1, AEE73472.1, YP_{—}002478771.1, YP_{—}002018970.1, YP_{—}001953230.1, ZP_{—}08683223.1, YP_{—}004073823.1, EGQ99856.1, ZP_{—}08664912.1, EGQ79321.1, YP_{—}001681700.1, AEJ51356.1, YP_{—}004378292.1, YP_{—}004237802.1, YP_{—}004166920.1, YP_{—}004043011.1, YP_{—}003997728.1, YP_{—}002975437.1, YP_{—}002514072.1, YP_{—}001433829.1, YP_{—}001185975.1, YP_{—}004676549.1, YP_{—}004016358.1, YP_{—}911347.1, YP_{—}004658403.1, YP_{—}002015455.1, YP_{—}001996171.1, YP_{—}001998271.1, YP_{—}001960099.1, YP_{—}001942826.1, YP_{—}001130666.1, YP_{—}004608353.1, YP_{—}508400.1, YP_{—}374553.1, ZP_{—}06298411.1, ZP_{—}06044299.1, ZP_{—}04390473.1, ZP_{—}04055222.1, ZP_{—}03779980.1, ZP_{—}03729400.1, ZP_{—}03390832.1, YP_{—}004580682.1, YP_{—}001988281.1, YP_{—}644219.1, YP_{—}665459.1, NP_{—}895289.1, YP_{—}004275231.1, NP_{—}208189.1, BAJ60529.1, BAJ59008.1, BAJ57509.1, BAJ56032.1, ZP_{—}01254396.1, YP_{—}445036.1, EGL90046.1, YP_{—}004510847.1, ZP_{—}08450330.1, YP_{—}003387804.1, YP_{—}003058152.1, ZP_{—}03438664.1, ZP_{—}01884341.1, AEG33860.1, YP_{—}004429375.1, ZP_{—}08459444.1, ZP_{—}07909193.1, ZP_{—}07908670.1, EFT26139.1, EFT23947.1, EFT12708.1, EFT03750.1, EFS82814.1, EFS74272.1, EFS67128.1, ZP_{—}06844564.1, YP_{—}826658.1, YP_{—}001195249.1, YP_{—}003095978.1, YP_{—}469292.1, YP_{—}004442054.1, YP_{—}004461174.1, YP_{—}004055616.1, YP_{—}003576656.1, YP_{—}003094537.1, YP_{—}001295973.1, AEE71143.1, YP_{—}004447480.1, YP_{—}001978005.1, ZP_{—}08413507.1, ZP_{—}07820264.1, YP_{—}416780.1, EGI86036.1, YP_{—}003109321.1, YP_{—}001275268.1, YP_{—}380171.1, YP_{—}159073.1, YP_{—}004203456.1, YP_{—}003761844.1, YP_{—}040853.1, ZP_{—}08328557.1, CBL87253.1, CBL87167.1, YP_{—}004316768.1, EFS92548.1, YP_{—}001016505.1, EGG67688.1, YP_{—}003528837.1, YP_{—}002434942.1, YP_{—}117835.1, YP_{—}004150583.1, YP_{—}003755105.1, YP_{—}002526442.1, YP_{—}003120958.1, EGE94241.1, YP_{—}004345416.1, EFS79952.1, ZP_{—}06964253.1, EGE60050.1, CBZ52359.1, ADU40304.1, ADQ77229.1, YP_{—}003196038.1, YP_{—}144713.1, YP_{—}001304143.1, YP_{—}113082.1, ADO76516.1, YP_{—}003326349.1, YP_{—}003289755.1, YP_{—}003089327.1, ZP_{—}07911965.1, ZP_{—}05773583.1, ZP_{—}05765271.1, YP_{—}003154888.1, YP_{—}003142045.1, YP_{—}002280953.1, NP_{—}371963.1, NP_{—}422368.1, EGC98966.1, EGC76398.1, YP_{—}004263661.1, YP_{—}004252039.1, YP_{—}679036.1, YP_{—}499973.1, ZP_{—}08090745.1, ZP_{—}08108339.1, YP_{—}001531594.1, ZP_{—}01051588.1, NP_{—}646145.1, NP_{—}224146.1, ZP_{—}08054972.1, ZP_{—}08053009.1, YP_{—}003584878.1, ZP_{—}07939405.1, ZP_{—}03439290.1, ADU82392.1, ADU83943.1, ADU85424.1, ADU80668.1, YP_{—}001225733.1, YP_{—}003863039.1, ZP_{—}01061682.1, YP_{—}767568.1, ZP_{—}07865749.1, ZP_{—}06858058.1, YP_{—}628213.1, EFT81350.1, EFT66610.1, EFT51424.1, ZP_{—}04839161.1, ZP_{—}05633406.1, ZP_{—}05288381.1, AAR37813.1, EFS03282.1, EFS03278.1, YP_{—}004046539.1, ZP_{—}07749550.1, ZP_{—}07729731.1, ADN80650.1, ZP_{—}07088856.1, ZP_{—}07080219.1, ZP_{—}06949721.1, ZP_{—}05685436.1, YP_{—}002550450.1, YP_{—}803715.1, ZP_{—}07720023.1, ZP_{—}07469700.1, ZP_{—}07365619.1, ZP_{—}06924335.1, ZP_{—}06715776.1, ZP_{—}06303722.1, ZP_{—}06303721.1, ZP_{—}06264319.1, ZP_{—}06155528.1, ZP_{—}05745707.1, ZP_{—}04866244.1, ZP_{—}04199629.1, ZP_{—}04195783.1, ZP_{—}04067276.1, ZP_{—}03968868.1, ZP_{—}03963857.1, ZP_{—}03933079.1, ZP_{—}03497046.1, ZP_{—}03475134.1, ZP_{—}01890152.1, ZP_{—}01086712.1, ZP_{—}06021845.1, ZP_{—}02183427.1, ZP_{—}02162695.1, ZP_{—}02032824.1, ZP_{—}01993906.1, ZP_{—}01993127.1, ZP_{—}01983694.1, ZP_{—}01972527.1, ZP_{—}01819838.1, ZP_{—}01817962.1, ZP_{—}01740947.1, ZP_{—}01734991.1, ZP_{—}01694775.1, ZP_{—}01678972.1, ZP_{—}01468566.1, ZP_{—}01408749.1, ZP_{—}01386800.1, ZP_{—}01202184.1, ZP_{—}01174108.1, ZP_{—}01174047.1, ZP_{—}01118729.1, ZP_{—}01081268.1, ZP_{—}00998573.1, ZP_{—}00739793.1, YP_{—}002302140.1, ZP_{—}07358151.1, ZP_{—}06668925.1, ZP_{—}06668924.1, ZP_{—}06667106.1, ZP_{—}06324464.1, ZP_{—}06196777.1, ZP_{—}05114159.1, ZP_{—}05083968.1, ZP_{—}05070370.1, ZP_{—}05030022.1, ZP_{—}04673064.1, ZP_{—}04581752.1, ZP_{—}01052079.1, ZP_{—}07661104.1, ZP_{—}06077819.1, YP_{—}002835579.1, YP_{—}002267069.1, YP_{—}002129114.1, YP_{—}001929236.1, YP_{—}001910999.1, YP_{—}001854051.1, YP_{—}001094152.1, YP_{—}001044252.1, YP_{—}861818.1, YP_{—}915522.1, YP_{—}807371.1, YP_{—}353800.1, YP_{—}342402.1, YP_{—}065168.1, YP_{—}015797.1, YP_{—}005051.1, NP_{—}856449.1, NP_{—}661547.1, NP_{—}358448.1, YP_{—}003929442.1, YP_{—}003927769.1, ADO06185.1, ADO04689.1, ADL23243.1, YP_{—}003789202.1, ADJ79786.1, YP_{—}003516488.1, ADI97953.1, ADI35485.1, YP_{—}003716800.1, ZP_{—}00241359.1, YP_{—}003718040.1, CAQ49862.1, YP_{—}003282331.1, AAP97897.1, ACX99978.1, ACX98578.1, YP_{—}003472544.1, ZP_{—}06382734.1, EEZ79852.1, ZP_{—}05299989.1, ZP_{—}05299895.1, XP_{—}002367632.1, ZP_{—}03529835.1, ZP_{—}03517011.1, ZP_{—}03505783.1, XP_{—}001310698.1, ABK27691.1, CAB59281.2,
in particular NP_{—}391071.1 (encoded by SEQ ID No. 11), BAI86717.1, YP_{—}004205024.1, ZP_{—}06873224.1, YP_{—}003974610.1, YP_{—}001422460.1, AEB25326.1, YP_{—}003921585.1, YP_{—}080482.1, ZP_{—}03054334.1, YP_{—}001488077.1, YP_{—}081348.1, YP_{—}003426902.1, NP_{—}243195.1, ZP_{—}08004522.1, YP_{—}003565624.1, YP_{—}004095847.1, YP_{—}003600348.1, ZP_{—}08006697.1, ZP_{—}04248389.1, YP_{—}174267.1, YP_{—}001376512.1, ZP_{—}04226233.1, ZP_{—}04100460.1, YP_{—}002369417.1, ZP_{—}03229411.1, ZP_{—}04110635.1, ZP_{—}04287684.1, ZP_{—}04172877.1, ZP_{—}04158983.1, ZP_{—}04219330.1, NP_{—}830409.1, YP_{—}003790454.1, ZP_{—}04184510.1, YP_{—}001642542.1, ZP_{—}04074263.1, ZP_{—}04319784.1, NP_{—}847074.1, YP_{—}001373857.1, ZP_{—}04122524.1, ZP_{—}03230841.1, YP_{—}082111.1, NP_{—}834329.1, YP_{—}002444060.1, ZP_{—}04170954.1, YP_{—}002453687.1, ZP_{—}04153266.1, ZP_{—}04302850.1, YP_{—}002365390.1, ZP_{—}04216141.1, ZP_{—}04298961.1, ZP_{—}00740055.1, ZP_{—}04277177.1, ZP_{—}04104350.1, ZP_{—}04176651.1, YP_{—}001647239.1, ZP_{—}04188247.1, ZP_{—}04149717.1, YP_{—}003794343.1, ZP_{—}04230016.1, YP_{—}001643400.1, ZP_{—}04209092.1, ZP_{—}04235899.1, YP_{—}003428808.1, ZP_{—}08005962.1, YP_{—}003599946.1, YP_{—}003565223.1, ZP_{—}01859623.1, YP_{—}004569425.1, ZP_{—}04432601.1, ZP_{—}03227314.1, YP_{—}003699559.1, ZP_{—}07709417.1, ZP_{—}01723571.1, NP_{—}244046.1, ZP_{—}08006365.1, ZP_{—}00738801.1, ZP_{—}04160852.1, ZP_{—}04166021.1, ZP_{—}04154769.1, ZP_{—}04109769.1, ZP_{—}04109049.1, ZP_{—}04108444.1, ZP_{—}04075249.1, ZP_{—}00741173.1, ZP_{—}00739793.1, ZP_{—}01174108.1, ZP_{—}01174047.1, ZP_{—}00241359.1, ZP_{—}04195783.1, ZP_{—}04199629.1, ZP_{—}04067276.1
and particularly preferably NP_{—}391071.1 (encoded by SEQ ID No. 11)
and
proteins with a polypeptide sequence wherein up to 60%, preferably up to 25%, particularly preferably up to 15%, in particular up to 10, 9, 8, 7, 6, 5, 4, 3, 2 or 1% of the amino acid residues compared to the aforementioned reference sequences are modified by deletion, insertion, substitution or a combination thereof and which still possess at least 50%, preferably 65%, particularly preferably 80%, in particular more than 90% of the activity of the protein with the corresponding, aforementioned reference sequence, wherein 100% activity of the reference protein is understood to mean the increasing of the activity of the cells used as a biocatalyst, i.e. the quantity of substance converted per unit time based on the cell quantity used (units per gram cell dry weight [U/g CDW]) in comparison to the activity of the biocatalyst in the absence of the reference protein, wherein the activity in this connection and in connection with the determination of the activity of the enzyme E₃ in general is understood to mean in particular the conversion of pyruvate to alanine.

### Enzyme E₄ ω-Oxidation

[0060] For the production of an ω-amino-functionalized carboxylic acid or an ω-amino-functionalized carboxylate ester, it can be advantageous if the second genetic modification comprises increased activity of an enzyme E₄ which catalyses the conversion of ω-hydroxycarboxylic acids or ω-hydroxycarboxylate esters to the corresponding ω-oxocarboxylic acids or ω-oxocarboxylate esters. This increased activity of the enzyme E₄ can also be advantageous if the preparation of ω-oxocarboxylic acids, ω-oxocarboxylate esters, ω-carboxycarboxylic acid or ω-carboxycarboxylate esters is desired.

[0061] Should the microorganisms according to the invention be used in a process for the production of ω-oxocarboxylic acids or ω-oxocarboxylate esters or of ω-functionalized compounds derived from ω-oxocarboxylic acids or ω-oxocarboxylate esters such as for example ω-amino compounds, then it is advantageous if the microorganism, as already described above for E₂, displays decreased activity of an aldehyde dehydrogenase of EC 1.2.1.3, EC 1.2.1.4 or EC 1.2.1.5 in comparison to its wild type. In this connection, preferred enzymes E₄ are those which only catalyse the respective first-mentioned of the two reactions mentioned in the following section.

### Specific Enzymes E₄

[0062] Preferably the enzyme E₄ is

a fatty alcohol oxidase of EC 1.1.3.20, which preferentially catalyses at least one of the following reactions, in particular the first-mentioned:
ω-hydroxyalkanoic acid (ester)+O₂=ω-oxoalkanoic acid (ester)+H₂O₂ and ω-oxoalkanoic acid (ester)+O₂=ω-carboxyalkanoic acid (ester)+H₂O₂ or an AlkJ alcohol dehydrogenase of EC 1.1.99.-, which preferentially catalyses at least one of the following reactions, in particular the first-mentioned:
ω-hydroxyalkanoic acid (ester)+oxidized acceptor=ω-oxoalkanoic acid (ester)+reduced acceptor and
ω-oxoalkanoic acid (ester)+oxidized acceptor=ω-carboxyalkanoic acid (ester)+reduced acceptor or
an alcohol dehydrogenase of EC 1.1.1.1 or EC 1.1.1.2, which preferentially catalyses at least one of the following reactions, in particular the first-mentioned:
ω-hydroxyalkanoic acid (ester)+NAD(P)⁺=ω-oxoalkanoic acid (ester)+NAD(P)H+ H⁺ and
ω-oxoalkanoic acid (ester)+NAD(P)⁺=ω-carboxyalkanoic acid (ester)+NAD(P)H+H⁺.

[0063] Such preferable fatty alcohol oxidases are selected from

AAS46878.1, ACX81419.1, AAS46879.1, CAB75353.1, AAS46880.1, XP_{—}712350.1, XP_{—}002422236.1, XP_{—}712386.1, EEQ43775.1, XP_{—}001525361.1, XP_{—}001386087.1, XP_{—}459506.2, CAB75351.1, CAB75352.1, XP_{—}001385255.2, EDK39369.2, XP_{—}001484086.1, XP_{—}002618046.1, XP_{—}002548766.1, XP_{—}002548765.1, XP_{—}003041566.1, XP_{—}003328562.1, XP_{—}001214264.1, XP_{—}001904377.1, XP_{—}658227.1, XP_{—}001591990.1, XP_{—}753079.1, XP_{—}002569337.1, XP_{—}001268562.1, XP_{—}003348911.1, EGP90120.1, XP_{—}001389382.1, EER37923.1, XP_{—}001264046.1, EGO58212.1, XP_{—}001554225.1, XP_{—}003298648.1, XP_{—}959005.1, XP_{—}002841296.1, XP_{—}001940486.1, EGR52262.1, EEQ89581.1, EGD99881.1, EFQ33355.1, XP_{—}001821106.1, XP_{—}002622231.1, EGG03784.1, EGC44059.1, XP_{—}003018036.1, XP_{—}003011696.1, EFY90752.1, XP_{—}001227812.1, XP_{—}758170.1, XP_{—}001243546.1, XP_{—}002479333.1, XP_{—}003344707.1, EFW14100.1, XP_{—}003071927.1, XP_{—}003171263.1, XP_{—}003051757.1, XP_{—}002147053.1, EEH19591.1, EEH50473.1, XP_{—}001792978.1, XP_{—}387094.1, EFY98644.1, XP_{—}002788971.1, XP_{—}002842592.1, EFX04185.1, XP_{—}003231449.1, XP_{—}001729067.1, CBX94189.1, XP_{—}001413535.1, ACF22878.1, B5WWZ9.1, XP_{—}002994642.1, XP_{—}002269629.1, XP_{—}002519938.1, XP_{—}002982582.1, NP_{—}001047464.1, EEC73620.1, XP_{—}002981110.1, XP_{—}002960521.1, NP_{—}566729.1, XP_{—}001541970.1, XP_{—}002967201.1, BAK00483.1, XP_{—}002182547.1, BAK02336.1, XP_{—}002454190.1, XP_{—}002328753.1, XP_{—}002867943.1, XP_{—}002285334.1, CAC87643.1, CAN71289.1, XP_{—}002454188.1, AAL31049.1, XP_{—}002464494.1, AAL31021.1, YP_{—}117187.1, XP_{—}002543430.1, CAA18625.1, XP_{—}002883430.1, NP_{—}193673.2, XP_{—}002529832.1, XP_{—}001753124.1, NP_{—}001142399.1, ACN27562.1, XP_{—}002464495.1, ACR36691.1, BAJ86655.1, B5WWZ8.1, NP_{—}001148058.1, ABR17814.1, EAY78905.1, NP_{—}194586.1, AAM63097.1, AAK64154.1, NP_{—}001064839.2, XP_{—}002869492.1, XP_{—}002314488.1, AAL31024.1, ZP_{—}06967355.1, AAP54248.2, XP_{—}002311685.1, ACF87929.1, YP_{—}907078.1, EGE07035.1, YP_{—}001849908.1, XP_{—}002464496.1, EEC67160.1, AAL31027.1, XP_{—}001761391.1, XP_{—}002961172.1, XP_{—}002528823.1, XP_{—}002966834.1, NP_{—}001176205.1, XP_{—}001763007.1, XP_{—}002272123.1, XP_{—}002889487.1, XP_{—}003003157.1, NP_{—}285451.1, EGG23219.1, NP_{—}171895.2, YP_{—}003395677.1, Q9ZWB9.1, ACF88407.1, ZP_{—}06413771.1, EEE51131.1, YP_{—}003835264.1, YP_{—}003397164.1, YP_{—}004081922.1, XP_{—}003294587.1, EEE51130.1, YP_{—}003647529.1, YP_{—}003647985.1, CBI29206.3, XP_{—}629786.1, ZP_{—}07964664.1, EEE57396.1, EEH09589.1, YP_{—}003265796.1, YP_{—}001840752.1, ZP_{—}08620775.1, ACR36076.1, ZP_{—}05043749.1, YP_{—}980677.1, ZP_{—}05043728.1, YP_{—}692894.1, NP_{—}710223.1, EEC67159.1, AAP03110.1, EFA85697.1, YP_{—}691805.1, YP_{—}551012.1, YP_{—}001174466.1, YP_{—}002796294.1, YP_{—}004716331.1, YP_{—}001019547.1, YP_{—}585737.1, AEA86007.1, YP_{—}960830.1, YP_{—}004743970.1, ZP_{—}03431349.1, ZP_{—}06448642.1, ZP_{—}07430351.1, NP_{—}215006.2, ZP_{—}03535393.1, ZP_{—}06801690.1, YP_{—}001849132.1, NP_{—}854165.1, ZP_{—}03427234.1, CBJ27378.1, NP_{—}334920.1, ZP_{—}08571383.1, YP_{—}728161.1, ZP_{—}01896040.1, ZP_{—}03530923.1, YP_{—}551306.1, YP_{—}003167456.1, YP_{—}606070.1, ZP_{—}06850167.1, ADP99095.1, YP_{—}907986.1, ZP_{—}04924166.1, ZP_{—}08139923.1, YP_{—}001270300.1, YP_{—}521830.1, YP_{—}003147410.1, YP_{—}002007173.1, ADR62464.1, YP_{—}004382294.1, NP_{—}747223.1, YP_{—}004687462.1, NP_{—}902159.1, ZP_{—}04936784.1, YP_{—}003914667.1, ZP_{—}01306356.1, ZP_{—}04750553.1, YP_{—}002875279.1, YP_{—}004704374.1, YP_{—}001671392.1, NP_{—}249055.1, ZP_{—}06876360.1, YP_{—}001345853.1, YP_{—}002437969.1, YP_{—}004356853.1, YP_{—}351075.1, CBI23676.3, YP_{—}001189668.1, YP_{—}001528881.1, YP_{—}001613612.1, YP_{—}001747218.1, YP_{—}003393002.1, YP_{—}001365074.1, ZP_{—}07778129.1, ZP_{—}07392715.1, YP_{—}001553329.1, YP_{—}262925.1, YP_{—}751961.1, YP_{—}564183.1, YP_{—}003811876.1, YP_{—}002356821.1, YP_{—}001051828.1, YP_{—}001837525.1, NP_{—}716513.1, ZP_{—}01915079.1, ZP_{—}02156621.1, YP_{—}001184631.1, YP_{—}001475595.1, ZP_{—}05042393.1, YP_{—}962228.1, YP_{—}001612275.1, ADV55625.1, YP_{—}001675797.1, YP_{—}003555260.1, ZP_{—}01075039.1, YP_{—}003812822.1, YP_{—}001503351.1, EFN52938.1, YP_{—}001759063.1, ZP_{—}06503577.1, YP_{—}871025.1, ZP_{—}08564919.1, YP_{—}002310162.1, YP_{—}732875.1, YP_{—}001092722.1, YP_{—}739324.1, XP_{—}002333995.1, NP_{—}085596.1, YP_{—}928870.1, EGD05748.1, NP_{—}443993.1, ZP_{—}08138057.1, ZP_{—}05041587.1, ZP_{—}07011380.1, YP_{—}001612684.1, ZP_{—}07669342.1, ZP_{—}06508361.1, ZP_{—}03423639.1, YP_{—}923293.1, ZP_{—}05061865.1, ZP_{—}08181496.1, YP_{—}559605.1, ZP_{—}06841320.1, ZP_{—}01620712.1, YP_{—}001896340.1, ZP_{—}03276650.1, YP_{—}004303194.1, ZP_{—}08180715.1, ZP_{—}06382740.1, ZP_{—}01034555.1, YP_{—}004604560.1, YP_{—}001020142.1, YP_{—}935375.1, ZP_{—}01546137.1, ZP_{—}07661079.1, YP_{—}001860640.1, ZP_{—}06052841.1, ZP_{—}01881170.1, ZP_{—}05781455.1, YP_{—}932732.1, ZP_{—}08119300.1, YP_{—}004715268.1, ZP_{—}03697402.1, YP_{—}004126957.1, ZP_{—}06703136.1, NP_{—}642445.1, ZP_{—}08273900.1, YP_{—}004524313.1, ZP_{—}01902993.1, YP_{—}001900094.1, AEA84888.1, YP_{—}004690289.1, NP_{—}714358.1, YP_{—}682471.1, YP_{—}003239.1, YP_{—}997465.1, YP_{—}003452130.1, ZP_{—}01739153.1, YP_{—}004219483.1, YP_{—}001761298.1, ZP_{—}01438251.1, CBI37146.3, ZP_{—}04748383.1, YP_{—}004362245.1, ZP_{—}05912795.1, YP_{—}003390234.1, YP_{—}003122799.1, CCB77579.1, EGB06416.1, ZP_{—}08389346.1, YP_{—}191496.1, ZP_{—}05224727.1, ZP_{—}01125614.1, YP_{—}466287.1, YP_{—}001368620.1, YP_{—}001380256.1, YP_{—}002361951.1, YP_{—}002756103.1, YP_{—}001801399.1, ZP_{—}06847140.1, YP_{—}003200069.1, YP_{—}001940247.1, YP_{—}001584322.1, ZP_{—}04679227.1, YP_{—}002493674.1, YP_{—}002135530.1, YP_{—}004290424.1, YP_{—}001772011.1, ZP_{—}08189046.1, ZP_{—}03423640.1, YP_{—}001834251.1, ZP_{—}01041752.1, YP_{—}001533410.1, YP_{—}269751.1, YP_{—}002432994.1, YP_{—}003694653.1, CAD47896.1, NP_{—}769359.1, YP_{—}004239460.1, YP_{—}004605221.1, YP_{—}001961214.1, YP_{—}001837513.1, YP_{—}004335962.1, YP_{—}004358600.1, ZP_{—}05050026.1, YP_{—}003202983.1, BAD03777.1, ZP_{—}02165013.1, NP_{—}774131.1, YP_{—}432169.1, ZP_{—}05000547.1, YP_{—}001261233.1, XP_{—}002593969.1, XP_{—}002603265.1, YP_{—}003342435.1, ZP_{—}01253183.1, EGO36831.1, YP_{—}001866737.1, YP_{—}001523879.1, YP_{—}133594.1, YP_{—}003768990.1, YP_{—}001237820.1, YP_{—}003133224.1, ZP_{—}01896771.1, ZP_{—}01865125.1, NP_{—}960319.1, YP_{—}826958.1, YP_{—}003326608.1, YP_{—}002219515.1, NP_{—}217926.1, ZP_{—}07441899.2, YP_{—}001208178.1, ADM42038.1, YP_{—}002433510.1, ZP_{—}08274313.1, EGO38668.1, ZP_{—}03393221.1, NP_{—}356358.1, ZP_{—}06055780.1, YP_{—}001684562.1, ZP_{—}08528157.1, BAD03162.1, YP_{—}001800712.1, ACL37106.1, YP_{—}883489.1, ZP_{—}01075202.1, NP_{—}969446.1, ZP_{—}01129577.1, YP_{—}001530285.1, ZP_{—}04746501.1, YP_{—}001341980.1, YP_{—}905003.1, ZP_{—}05218299.1, ZP_{—}08665577.1,
preferably
AAS46878.1, ACX81419.1, AAS46879.1, CAB75353.1, AAS46880.1, XP_{—}712350.1, XP_{—}002422236.1, XP_{—}712386.1, EEQ43775.1, XP_{—}001525361.1, XP_{—}001386087.1, XP_{—}459506.2, CAB75351.1, CAB75352.1, XP_{—}001385255.2, EDK39369.2, XP_{—}001484086.1, XP_{—}002618046.1, XP_{—}002548766.1, XP_{—}002548765.1, XP_{—}003041566.1, XP_{—}001214264.1, XP_{—}001904377.1, XP_{—}658227.1, XP_{—}001591990.1, XP_{—}753079.1, XP_{—}002569337.1, XP_{—}001268562.1, XP_{—}003348911.1, EGP90120.1, XP_{—}001389382.1, EER37923.1, XP_{—}001264046.1, EGO58212.1, XP_{—}001554225.1, XP_{—}003298648.1, XP_{—}959005.1, XP_{—}002841296.1, XP_{—}001940486.1, EGR52262.1, EEQ89581.1, EGD99881.1, EFQ33355.1, XP_{—}001821106.1, XP_{—}002622231.1, EGC44059.1, XP_{—}003018036.1, XP_{—}003011696.1, EFY90752.1, XP_{—}001227812.1, XP_{—}001243546.1, XP_{—}002479333.1, XP_{—}003344707.1, EFW14100.1, XP_{—}003071927.1, XP_{—}003171263.1, XP_{—}003051757.1, XP_{—}002147053.1, EEH19591.1, EEH50473.1, XP_{—}001792978.1, XP_{—}387094.1, EFY98644.1, XP_{—}002788971.1, XP_{—}002842592.1, EFX04185.1, XP_{—}003231449.1, CBX94189.1, XP_{—}001413535.1, XP_{—}001541970.1, XP_{—}002543430.1, EGE07035.1, XP_{—}003003157.1
and particularly preferably

### AAS46878.1, ACX81419.1, AAS46879.1, CAB75353.1, AAS46880.1, XP_{—}712350.1, XP_{—}002422236.1, XP_{—}712386.1, EEQ43775.1, CAB75351.1, CAB75352.1, XP_{—}002548766.1, XP_{—}002548765.1,

[0064] and
proteins with a polypeptide sequence wherein up to 60%, preferably up to 25%, particularly preferably up to 15%, in particular up to 10, 9, 8, 7, 6, 5, 4, 3, 2 or 1% of the amino acid residues compared to the aforementioned reference sequences are modified by deletion, insertion, substitution or a combination thereof and which still possess at least 50%, preferably 65%, particularly preferably 80%, in particular more than 90% of the activity of the protein with the corresponding, aforementioned reference sequence, wherein 100% activity of the reference protein is understood to mean the increasing of the activity of the cells used as a biocatalyst, i.e. the quantity of substance converted per unit time based on the cell quantity used (units per gram cell dry weight [U/g CDW]) in comparison to the activity of the biocatalyst in the absence of the reference protein, wherein the activity in this connection and in connection with the determination of the activity of the enzyme E₄ in general is understood to mean in particular the conversion of ω-oxolauric acid and/or methyl ω-oxolaurate to ω-carboxylauric acid and/or methyl w-carboxylaurate or the conversion of ω-hydroxylauric acid and/or methyl ω-hydroxylaurate to w-oxolauric acid and/or methyl ω-oxolaurate.

[0065] Such preferable AlkJ alcohol dehydrogenases are selected from

Q00593.1, Q9WWW2.1, ZP_{—}00957061.1, YP_{—}957894.1, CAC38030.1, YP_{—}694430.1, YP_{—}957725.1, YP_{—}001672216.1, YP_{—}552061.1, YP_{—}130410.1, ZP_{—}06155535.1, ZP_{—}01222730.1, YP_{—}691907.1, YP_{—}002297804.1, YP_{—}004283522.1, YP_{—}001234383.1, YP_{—}004435031.1, ZP_{—}05110316.1, ZP_{—}05042898.1, YP_{—}004466324.1, ZP_{—}08553549.1, YP_{—}004125220.1, ADI22536.1, ADI18461.1, YP_{—}003810975.1, YP_{—}662346.1, YP_{—}004427557.1, YP_{—}692606.1, ZP_{—}05043291.1, YP_{—}440752.1, ZP_{—}02386160.1, ZP_{—}04763547.1, ZP_{—}02361232.1, YP_{—}003376674.1, ZP_{—}02354055.1, ZP_{—}05085930.1, ADQ00130.1, YP_{—}003643016.1, ZP_{—}05040520.1, YP_{—}691922.1, AAX23098.1, BAD07371.1, NP_{—}104379.1, YP_{—}002551960.1, YP_{—}003908558.1, YP_{—}987903.1, ZP_{—}05785860.1, YP_{—}004145612.1, YP_{—}004140926.1, CAZ88300.1, ZP_{—}05041901.1, YP_{—}533645.1, ZP_{—}01754259.1, CBA31223.1, YP_{—}87542.1, YP_{—}106852.1, ZP_{—}08402506.1, ZP_{—}05055020.1, ZP_{—}02400829.1, YP_{—}104747.1, ZP_{—}02409412.1, YP_{—}001057269.1, YP_{—}004229837.1, YP_{—}294429.1, YP_{—}001028112.1, ZP_{—}02479747.1, YP_{—}002874799.1, ZP_{—}03541051.1, YP_{—}003606536.1, ZP_{—}02887167.1, YP_{—}001795572.1, YP_{—}487451.1, ACZ62814.1, YP_{—}560809.1, ZP_{—}02167462.1, YP_{—}004482869.1, YP_{—}001581248.1, ZP_{—}07374066.1, YP_{—}001203981.1, ZP_{—}06840259.1, ZP_{—}01915145.1, NP_{—}774525.1, ZP_{—}03561080.1, YP_{—}001208258.1, YP_{—}001897374.1, YP_{—}001413909.1, YP_{—}366469.1, YP_{—}521854.1, YP_{—}004490642.1, YP_{—}003280349.1, ZP_{—}03588744.1, YP_{—}001562229.1, YP_{—}001120981.1, ZP_{—}03574970.1, YP_{—}004234225.1, ZP_{—}02377531.1, ZP_{—}02149954.1, YP_{—}001237360.1, ZP_{—}03266156.1, YP_{—}782821.1, YP_{—}004754039.1, BAB61732.1, ZP_{—}07046388.1, ZP_{—}02145452.1, BAF45123.1, YP_{—}002129953.1, YP_{—}003812439.1, ZP_{—}01055291.1, BAF45124.1, EGH71399.1, ZP_{—}05060389.1, ZP_{—}05090872.1, BAF45126.1, BAB07804.1, ZP_{—}06053464.1, YP_{—}001238278.1, ZP_{—}04944469.1, YP_{—}001171160.1, YP_{—}002984373.1, YP_{—}002237649.1, ZP_{—}08276443.1, BAF98451.1, ZP_{—}05124197.1, YP_{—}568640.1, ZP_{—}05785341.1, NP_{—}769037.1, YP_{—}370657.1, YP_{—}775005.1, ZP_{—}02911119.1, YP_{—}165460.1, ZP_{—}02891796.1, YP_{—}622328.1, ZP_{—}07675057.1, YP_{—}001901188.1, YP_{—}003592183.1, ZP_{—}02361040.1, NP_{—}518244.1, YP_{—}001809673.1, NP_{—}947032.1, YP_{—}001766369.1, YP_{—}002255997.1, ZP_{—}04940241.1, YP_{—}004012032.1, YP_{—}841049.1, YP_{—}002983249.1, YP_{—}003643276.1, YP_{—}003855487.1, YP_{—}003778137.1, ZP_{—}02361104.1, CBA30511.1, ZP_{—}05781295.1, YP_{—}756865.1, ZP_{—}02461782.1, YP_{—}002007988.1, YP_{—}004110133.1, YP_{—}002229680.1, ZP_{—}02386040.1, YP_{—}004684069.1, YP_{—}373268.1, YP_{—}440614.1, NP_{—}421441.1, YP_{—}264896.1, YP_{—}004362617.1, ZP_{—}06053847.1, YP_{—}366538.1, YP_{—}003812285.1, YP_{—}004154520.1, ZP_{—}01901081.1, ZP_{—}02372179.1, ZP_{—}02453559.1, ADP98564.1, YP_{—}003747084.1, ZP_{—}02487888.1, ZP_{—}01768075.1, ZP_{—}02400664.1, YP_{—}106680.1, YP_{—}724753.1, YP_{—}002907583.1, YP_{—}004482470.1, YP_{—}167582.1, YP_{—}270109.1, YP_{—}004362333.1, ZP_{—}02504034.1, YP_{—}003189363.1, YP_{—}973212.1, ZP_{—}00952746.1, YP_{—}459665.1, YP_{—}777218.1, YP_{—}581107.1, ZP_{—}01878091.1, ZP_{—}01057973.1, YP_{—}002913124.1, ZP_{—}01035570.1, YP_{—}001777560.1, YP_{—}552627.1, ZP_{—}02890876.1, YP_{—}587146.1, YP_{—}004141814.1, YP_{—}001685369.1, ZP_{—}05343380.1, NP_{—}886000.1, ZP_{—}04942359.1, ZP_{—}01913732.1, ZP_{—}08244266.1, YP_{—}002233254.1, ZP_{—}01816670.1, YP_{—}837233.1, ZP_{—}07478008.1, ZP_{—}01985205.1, ZP_{—}07473972.1, ZP_{—}01067090.1, ZP_{—}01867788.1, ZP_{—}01754024.1, EGM19144.1, ZP_{—}07741283.1, ZP_{—}06876839.1, YP_{—}002395287.1, ZP_{—}07795498.1, NP_{—}102692.1, NP_{—}252789.1, YP_{—}004451100.1, ZP_{—}01305514.1, YP_{—}002438481.1, ZP_{—}04930310.1, YP_{—}001810189.1, YP_{—}104187.1, ZP_{—}01367534.1, YP_{—}001346382.1, ZP_{—}01878466.1, YP_{—}789017.1, YP_{—}001115422.1, ZP_{—}05067451.1, ZP_{—}05842072.1, YP_{—}001682976.1, YP_{—}761348.1, YP_{—}004611600.1, YP_{—}004188241.1, NP 419761.1, EFV85163.1, YP_{—}684227.1, ZP_{—}06177455.1, NP_{—}935088.1, YP_{—}004614491.1, ZP_{—}08697916.1, YP_{—}004689366.1, ZP_{—}05052326.1, YP_{—}267420.1, YP_{—}728575.1, YP_{—}001759584.1, YP_{—}557446.1, ZP_{—}06844897.1, ZP_{—}06079799.1, YP_{—}003771143.1, ZP_{—}05094472.1, YP_{—}511622.1, ACF98205.1, YP_{—}582314.1, ZP_{—}07660450.1, YP_{—}004065269.1, YP_{—}003979606.1, YP_{—}002520401.1, YP_{—}003579281.1, ZP_{—}01749397.1, ZP_{—}03265018.1, ZP_{—}07283393.1, YP_{—}001532150.1, YP_{—}298941.1, ZP_{—}06688181.1, ZP_{—}01611660.1, ZP_{—}02367747.1, EGP42870.1, ZP_{—}00993245.1, ABY65992.1, YP_{—}354800.1, ZP_{—}01747277.1, YP_{—}561728.1, ZP_{—}02190947.1, YP_{—}605824.1, YP_{—}001991873.1, ZP_{—}00955792.1, YP_{—}003594401.1, YP_{—}004156101.1, YP_{—}001472858.1, YP_{—}001746950.1, ZP_{—}08410042.1, ZP_{—}01116604.1, ADP99912.1, ZP_{—}01692203.1, YP_{—}001328534.1, YP_{—}999236.1, YP_{—}002278452.1, ZP_{—}01306234.1, YP_{—}002871776.1, ZP_{—}02369920.1, ZP_{—}01896942.1, YP_{—}002289724.1, AEG07584.1, YP_{—}999005.1, YP_{—}003552461.1, YP_{—}270668.1, ZP_{—}06862917.1, YP_{—}001811327.1, YP_{—}001166036.1, ABW06653.1, ZP_{—}01548976.1, ZP_{—}07774606.1, ZP_{—}05888080.1, YP_{—}003301477.1, YP_{—}341748.1, ZP_{—}05100248.1, YP_{—}918038.1, YP_{—}001500869.1, YP_{—}004305296.1, YP_{—}003342584.1, NP_{—}947961.1, ZP_{—}05124765.1, ZP_{—}01904700.1, YP_{—}003696207.1, YP_{—}004156699.1, YP_{—}001241858.1, NP_{—}104253.1, YP_{—}676241.1, ZP_{—}01736903.1, ZP_{—}00960121.1, NP_{—}436019.1, YP_{—}002945716.1, YP_{—}259594.1, EFV86615.1, AAY87334.1, NP_{—}900970.1, AEG07409.1, YP_{—}349087.1, YP_{—}004141055.1, YP_{—}001169476.1, YP_{—}001566960.1, YP_{—}260472.1, ZP_{—}07028078.1, YP_{—}004610468.1, YP_{—}003066461.1, YP_{—}961096.1, ZP_{—}08666573.1, ZP_{—}02187363.1, YP_{—}001631518.1, ZP_{—}08141293.1, YP_{—}001666324.1, NP_{—}387083.1, YP_{—}001526184.1, YP_{—}165213.1, YP_{—}003694923.1, YP_{—}004433897.1, YP_{—}001265431.1, ZP_{—}05068964.1, YP_{—}002313077.1, ZP_{—}02372305.1, YP_{—}004486039.1, YP_{—}341901.1, YP_{—}001862312.1, YP_{—}004681983.1, YP_{—}617373.1, EFV86570.1, YP_{—}001673285.1, BAK39604.1, YP_{—}001669327.1, YP_{—}004353150.1, YP_{—}001888124.1, ZP_{—}08645365.1, YP_{—}003410784.1, YP_{—}841363.1, EGP44033.1, YP_{—}001633470.1, EGP42855.1, ZP_{—}01115125.1, ADR57794.1, YP_{—}784649.1, YP_{—}373898.1, Q47944.1, YP_{—}001117950.1, ZP_{—}02380339.1, ZP_{—}03697092.1, YP_{—}003187112.1, YP_{—}004065439.1, NP_{—}742226.1, YP_{—}002429878.1, YP_{—}003556403.1, AEH81535.1, YP_{—}001887935.1, YP_{—}554605.1, ZP_{—}07333059.1, YP_{—}001991668.1, YP_{—}003694210.1, YP_{—}222680.1, YP_{—}002232672.1, YP_{—}001763402.1, YP_{—}001806802.1, YP_{—}662156.1, ZP_{—}05153429.1, ZP_{—}01893457.1, ZP_{—}04595387.1, ADP99389.1, ZP_{—}02890074.1, YP_{—}001313582.1, NP_{—}387401.1, ZP_{—}01863693.1, YP_{—}750630.1, ZP_{—}04939997.1, YP_{—}268077.1, ZP_{—}05169265.1, NP_{—}888994.1, ZP_{—}08408421.1, YP_{—}001155137.1, NP_{—}699017.1, YP_{—}002008190.1, YP_{—}004493716.1, YP_{—}266277.1, YP_{—}004654190.1, YP_{—}943422.1, ZP_{—}05162503.1, ZP_{—}02905080.1, ZP_{—}02905080.1, ZP_{—}03784461.1, YP_{—}001601784.1, YP_{—}002233786.1, YP_{—}622842.1, YP_{—}002822679.1, ZP_{—}04944312.1, ZP_{—}05179897.1, YP_{—}004483124.1, YP_{—}003390414.1, YP_{—}771968.1, YP_{—}001628465.1, YP_{—}004311599.1, ZP_{—}01037150.1, ZP_{—}01611812.1, ZP_{—}03575238.1, YP_{—}002278603.1, YP_{—}001593845.1, EGD01613.1, YP_{—}297574.1, YP_{—}367509.1, YP_{—}998315.1, ZP_{—}08664883.1, ZP_{—}05114787.1, ZP_{—}05450190.1, YP_{—}298028.1, ZP_{—}01034678.1, YP_{—}002827796.1, YP_{—}372762.1, YP_{—}004466723.1, ZP_{—}01012072.1, YP_{—}320380.1, ZP_{—}01075202.1, YP_{—}001312358.1, YP_{—}681895.1, ZP_{—}07718189.1, EGP55868.1, YP_{—}003750799.1, YP_{—}002984725.1, YP_{—}002543360.1, ZP_{—}01040714.1, ZP_{—}04717111.1, YP_{—}002422932.1, YP_{—}003506115.1, ZP_{—}01444019.1, ZP_{—}03587285.1, YP_{—}771439.1, YP_{—}001947593.1, YP_{—}001049712.1, YP_{—}003979888.1, YP_{—}001553786.1, YP_{—}003980878.1, YP_{—}001578274.1, YP_{—}472442.1, YP_{—}778292.1, EGE56670.1, YP_{—}002779312.1, YP_{—}432169.1, YP_{—}560963.1, YP_{—}001265285.1, YP_{—}002822699.1, YP_{—}002278091.1, ZP_{—}08632361.1, YP_{—}002229178.1, ZP_{—}06840392.1, ZP_{—}05069105.1, ZP_{—}00998644.1, YP_{—}004487901.1, YP_{—}680905.1, YP_{—}728088.1, YP_{—}001985833.1, YP_{—}002007099.1, ZP_{—}05066777.1, ZP_{—}01551182.1, YP_{—}002973332.1, ZP_{—}04681414.1, ZP_{—}07675148.1, AEH83964.1, YP_{—}004692042.1, CBJ36337.1, EGP48473.1, ZP_{—}03585612.1, YP_{—}001369428.1, YP_{—}001897527.1, AEG08472.1, YP_{—}001166065.1, NP_{—}437018.1, NP_{—}294689.1, YP_{—}002541437.1, YP_{—}004692953.1, NP_{—}107484.1, YP_{—}995681.1, YP_{—}765267.1, YP_{—}166223.1, ZP_{—}01740635.1, YP_{—}001234127.1, ZP_{—}02186681.1, YP_{—}004140839.1, YP_{—}001584499.1, ADI17244.1, ZP_{—}08698744.1, YP_{—}001022991.1, EFV84582.1, ZP_{—}01743515.1, YP_{—}001816113.1, YP_{—}004688050.1, YP_{—}001342912.1, ZP_{—}01125614.1, EGD05029.1, ZP_{—}03569823.1, ZP_{—}05089337.1, YP_{—}001901091.1, NP_{—}886663.1, ZP_{—}07718907.1, YP_{—}004687387.1, NP_{—}521464.1, ZP_{—}06688394.1, ZP_{—}08099738.1, ZP_{—}02885452.1, YP_{—}003744085.1, YP_{—}001328823.1, ZP_{—}02488044.1, ZP_{—}01015005.1, YP_{—}002983153.1, ZP_{—}06898725.1, ZP_{—}05886707.1, ZP_{—}08101209.1, ZP_{—}03319462.1, YP_{—}003134969.1, YP_{—}001188857.1, YP_{—}004557767.1, YP_{—}004675666.1, YP_{—}004358728.1, YP_{—}002252541.1, YP_{—}684009.1, ZP_{—}05085667.1, ZP_{—}02144674.1, YP_{—}004127560.1, ZP_{—}01901604.1, YP_{—}004280074.1, AEG67402.1, YP_{—}001416516.1, ZP_{—}01054720.1, ZP_{—}08197897.1, NP_{—}107235.1, YP_{—}002909966.1, ZP_{—}01545876.1, ZP_{—}02147729.1, ZP_{—}00946537.1, ZP_{—}01903844.1, ZP_{—}05085589.1, ACV84069.1, YP_{—}367172.1, ZP_{—}02165272.1, YP_{—}701696.1, ZP_{—}04935724.1, ZP_{—}02191362.1, ZP_{—}01740154.1, ZP_{—}07662819.1, NP_{—}103908.1, YP_{—}003159313.1, YP_{—}003197010.1, ZP_{—}02152342.1, YP_{—}001907189.1, YP_{—}004387414.1, YP_{—}001413869.1, ZP_{—}01916549.1, ZP_{—}03264661.1, AAY82840.1, YP_{—}003277969.1, YP_{—}767433.1, ZP_{—}01226234.1, EGE55950.1, NP_{—}882474.1, ZP_{—}04680938.1, YP_{—}004417965.1, ZP_{—}01367142.1, EGM13684.1, YP_{—}001262083.1, ZP_{—}01881606.1, ZP_{—}01002680.1, YP_{—}003606679.1, YP_{—}001868359.1, ZP_{—}01446736.1, YP_{—}004141411.1, YP_{—}002438878.1, YP_{—}002500414.1, EGP55675.1, ZP_{—}08405873.1, YP_{—}002975318.1, YP_{—}002823637.1, ZP_{—}02188786.1, YP_{—}004617386.1, ABL61001.1, YP_{—}004190679.1, YP_{—}004418710.1, YP_{—}001264994.1, NP_{—}252399.1, ACA21517.1, YP_{—}002541208.1, YP_{—}001369943.1, YP_{—}789454.1, YP_{—}004688060.1, YP_{—}611623.1, ZP_{—}07795086.1, ZP_{—}04929943.1, YP_{—}004444316.1, ZP_{—}01866687.1, ZP_{—}05973466.1, YP_{—}004353327.1, ZP_{—}05780591.1, ZP_{—}05784784.1, NP_{—}936564.1, ZP_{—}05739211.1, ZP_{—}05113045.1, ZP_{—}06689273.1, ZP_{—}06972168.1, ZP_{—}01616404.1, ZP_{—}07659253.1, ZP_{—}05117914.1, YP_{—}585662.1, YP_{—}004230016.1, NP_{—}763554.1, NP_{—}744101.1, ZP_{—}02465308.1, ACN56476.1, YP_{—}004689565.1, YP_{—}001600608.1, ZP_{—}06792595.1, YP_{—}001258553.1, ZP_{—}05165722.1, ZP_{—}03785098.1, YP_{—}002276744.1, YP_{—}002524856.1, ADP98420.1, YP_{—}001669248.1, ZP_{—}04764988.1, ZP_{—}08528163.1, ZP_{—}08529409.1, ZP_{—}05944625.1, YP_{—}676267.1, CBA26630.1, YP_{—}001592413.1, YP_{—}003486465.1, ZP_{—}02187562.1, ZP_{—}03702891.1, YP_{—}760283.1, ZP_{—}05450850.1, YP_{—}004533595.1, ZP_{—}02153313.1, YP_{—}001859265.1, YP_{—}001524099.1, ZP_{—}06126913.1, ZP_{—}07374926.1, ZP_{—}05050787.1, ZP_{—}01035411.1, Q8YFY2.2, YP_{—}002280903.1, EGM21512.1, YP_{—}004603010.1, ZP_{—}05088581.1, YP_{—}004302488.1, YP_{—}004141219.1, NP_{—}697569.1, YP_{—}003908705.1, YP_{—}915505.1, YP_{—}001789228.1, YP_{—}001042739.1, YP_{—}133405.1, ZP_{—}05180516.1, ZP_{—}05174702.1, ZP_{—}01438051.1, ZP_{—}04590345.1, ZP_{—}08411937.1, NP_{—}356519.2, ZP_{—}00964019.1, ZP_{—}00998343.1, ZP_{—}05181994.1, YP_{—}004107969.1, ZP_{—}02168070.1, ZP_{—}01750865.1, YP_{—}574504.1, YP_{—}004579902.1, YP_{—}104440.1, ZP_{—}05452167.1, ZP_{—}05342702.1, YP_{—}001862883.1, YP_{—}004538242.1, ZP_{—}07471513.1, ZP_{—}05169558.1, ZP_{—}00956995.1, ZP_{—}05096699.1, YP_{—}004610916.1, ZP_{—}01218118.1, AAU95210.1, ZP_{—}02405087.1, ZP_{—}04890639.1, YP_{—}352237.1, ZP_{—}02413594.1, ZP_{—}07474023.1, NP_{—}541317.1, YP_{—}001993222.1, ZP_{—}08199001.1, YP_{—}471839.1, ZP_{—}02492080.1, ZP_{—}04901176.1, ZP_{—}06915396.1, ZP_{—}07474845.1, ZP_{—}07477743.1, YP_{—}004152647.1, YP_{—}004755056.1, ZP_{—}05086419.1, YP_{—}004577547.1, ACD99850.1, YP_{—}980426.1, ZP_{—}05457072.1, ZP_{—}05936041.1, NP_{—}700124.1, ADT85599.1, YP_{—}110012.1, ZP_{—}05076113.1, YP_{—}001068288.1, ZP_{—}02457871.1, ZP_{—}01014169.1, EGE60620.1, YP_{—}001346810.1, YP_{—}003408795.1, YP_{—}003769675.1, YP_{—}001257876.1, EGH93583.1, ZP_{—}01442222.1, YP_{—}331617.1, ZP_{—}05636703.1, YP_{—}001594896.1, YP_{—}002822967.1, YP_{—}118823.1, ZP_{—}01878717.1, ZP_{—}07375284.1, YP_{—}001371250.1, ZP_{—}07658682.1, YP_{—}002898825.1, ZP_{—}01547199.1, YP_{—}223070.1, ZP_{—}05161482.1, ZP_{—}04679742.1, YP_{—}002778618.1, ZP_{—}01626756.1, ZP_{—}05101564.1, YP_{—}002947374.1, NP_{—}385053.1, YP_{—}001328117.1, YP_{—}004493948.1, YP_{—}003339515.1, YP_{—}004699488.1, ZP_{—}05101969.1, YP_{—}485352.1, ZP_{—}01746033.1, ZP_{—}06712293.1, ZP_{—}01158125.1, ZP_{—}01058616.1, ZP_{—}05739755.1, NP_{—}949067.1, ZP_{—}02364657.1, YP_{—}570690.1, YP_{—}001208663.1, ZP_{—}02357557.1, ZP_{—}04751682.1, YP_{—}001326253.1, YP_{—}487666.1, ZP_{—}05167919.1, ADI18237.1, YP_{—}002825245.1, ZP_{—}02144858.1, ZP_{—}02188790.1, ZP_{—}06794586.1, YP_{—}001809828.1, YP_{—}997974.1, YP_{—}001476791.1, ZP_{—}08635286.1, YP_{—}676287.1, ZP_{—}07308228.1, ZP_{—}04596242.1, YP_{—}001622726.1, NP_{—}699590.1, ZP_{—}01446884.1, YP_{—}001168504.1, ZP_{—}01616388.1, ZP_{—}05117189.1, ZP_{—}05876432.1, ADT64694.1, ZP_{—}01754911.1, ZP_{—}05880498.1, ZP_{—}02360829.1, ZP_{—}06052433.1, ZP_{—}08663540.1, YP_{—}003768966.1, ZP_{—}02165422.1, ZP_{—}00960985.1, ZP_{—}07026655.1, YP_{—}001753039.1, YP_{—}371288.1, YP_{—}002974725.1, YP_{—}776880.1, ZP_{—}05784963.1, ZP_{—}05124380.1, YP_{—}459030.1, ZP_{—}05090690.1, ZP_{—}05064893.1, ZP_{—}02367982.1, ZP_{—}01890564.1, NP_{—}541848.1, ZP_{—}00960263.1, ZP_{—}02961617.1, YP_{—}001242097.1, ZP_{—}05838258.1,
in particular
Q00593.1, Q9WWW2.1, ZP_{—}00957061.1, YP_{—}957894.1, CAC38030.1, YP_{—}694430.1, YP_{—}957725.1, YP_{—}001672216.1, YP_{—}552061.1, YP_{—}130410.1, ZP_{—}06155535.1, ZP_{—}01222730.1, YP_{—}691907.1, YP_{—}002297804.1, YP_{—}004283522.1, YP_{—}001234383.1, YP_{—}004435031.1, ZP_{—}05110316.1, ZP_{—}05042898.1, YP_{—}004466324.1, ZP_{—}08553549.1, YP_{—}004125220.1, ADI22536.1, ADI18461.1, YP_{—}003810975.1, YP_{—}662346.1, YP_{—}004427557.1, YP_{—}692606.1, ZP_{—}05043291.1, YP_{—}440752.1, ZP_{—}02386160.1, ZP_{—}04763547.1, ZP_{—}02361232.1, YP_{—}003376674.1, ZP_{—}02354055.1, ZP_{—}05085930.1, ADQ00130.1, YP_{—}003643016.1, ZP_{—}05040520.1, YP_{—}691922.1, AAX23098.1, BAD07371.1, NP_{—}104379.1, YP_{—}002551960.1, YP_{—}003908558.1, YP_{—}987903.1, ZP_{—}05785860.1, YP_{—}004145612.1, YP_{—}004140926.1, CAZ88300.1,
and particularly preferably

### Q00593.1, Q9WWW2.1, ZP_{—}00957061.1, YP_{—}957894.1, CAC38030.1, YP_{—}694430.1, YP_{—}957725.1, YP_{—}001672216.1.

[0066] and
proteins with a polypeptide sequence wherein up to 60%, preferably up to 25%, particularly preferably up to 15%, in particular up to 10, 9, 8, 7, 6, 5, 4, 3, 2 or 1% of the amino acid residues compared to the aforementioned reference sequences are modified by deletion, insertion, substitution or a combination thereof and which still possess at least 50%, preferably 65%, particularly preferably 80%, in particular more than 90% of the activity of the protein with the corresponding, aforementioned reference sequence, wherein 100% activity of the reference protein is understood to mean the increasing of the activity of the cells used as a biocatalyst, i.e. the quantity of substance converted per unit time based on the cell quantity used (units per gram cell dry weight [U/g CDW]) in comparison to the activity of the biocatalyst in the absence of the reference protein, wherein the activity in this connection is understood to mean in particular the conversion of ω-oxolauric acid and/or methyl ω-oxolaurate to ω-carboxylauric acid and/or methyl ω-carboxylaurate or the conversion of ω-hydroxylauric acid and/or methyl w-hydroxylaurate to ω-oxolauric acid and/or methyl ω-oxolaurate.

[0067] Such preferable alcohol dehydrogenases of EC 1.1.1.1 or EC 1.1.1.2 are selected from AdhE, AdhP, YjgB, YqhD, GIdA, EutG, YiaY, AdhE, AdhP, YhhX, YahK, HdhA, HisD, SerA, Tdh, Ugd, Udg, Gmd, YefA, YbiC, YdfG, YeaU, TtuC, YeiQ, YgbJ, YgcU, YgcT, YgcV, YggP, YgjR, YliI, YqiB, YzzH, LdhA, GapA, Epd, Dld, GatD, Gcd, GlpA, GlpB, GlpC, GlpD, GpsA and YphC from bacteria, in particular E. coli

and
proteins with a polypeptide sequence wherein up to 60%, preferably up to 25%, particularly preferably up to 15%, in particular up to 10, 9, 8, 7, 6, 5, 4, 3, 2 or 1% of the amino acid residues compared to the aforementioned reference sequences are modified by deletion, insertion, substitution or a combination thereof and which still possess at least 50%, preferably 65%, particularly preferably 80%, in particular more than 90% of the activity of the protein with the corresponding, aforementioned reference sequence, wherein 100% activity of the reference protein is understood to mean the increasing of the activity of the cells used as a biocatalyst, i.e. the quantity of substance converted per unit time based on the cell quantity used (units per gram cell dry weight [U/g CDW]) in comparison to the activity of the biocatalyst in the absence of the reference protein, wherein the activity in this connection is understood to mean in particular the conversion of ω-oxolauric acid and/or methyl ω-oxolaurate to ω-carboxylauric acid and/or methyl ω-carboxylaurate or the conversion of ω-hydroxylauric acid and/or methyl ω-hydroxylaurate to ω-oxolauric acid and/or methyl ω-oxolaurate.

[0068] WO2010062480 A2 describes, particularly in practical examples 3, 4, 6 and 7, microorganisms which compared to their wild type are capable of forming more fatty acids and fatty acid derivatives, in particular fatty alcohols, from at least one simple carbon source. The document also describes enzymes F₄ preferred according to the invention and the sequences thereof in particular in FIG. 10 and practical examples 2 to 7.

### Enzyme E₅ ω-Oxidation 2

[0069] For the production of an (β-carboxy-functionalized carboxylic acid or an ω-carboxy-functionalized carboxylate ester it can be advantageous if the second genetic modification comprises increased activity of an enzyme E₅ which catalyses the conversion of ω-oxocarboxylic acids or ω-oxocarboxylate esters to the corresponding ω-carboxycarboxylic acids or ω-carboxycarboxylate esters.

### Specific Enzymes E₅

[0070] Preferably the enzyme E₅ is an aldehyde dehydrogenase of EC 1.2.1.3, EC 1.2.1.4 or EC 1.2.1.5, which preferentially catalyses the following reaction: ω-oxoalkanoic acid (ester)+NAD(P)⁺=ω-carboxyalkanoic acid (ester)+NAD(P)H⁺

[0071] Such preferable aldehyde dehydrogenases are selected from Prr, Usg, MhpF, AstD, GdhA, FrmA, Feab, Asd, Sad, PuuE, GabT, YgaW, BetB, PutA, PuuC, FeaB, AldA, Prr, EutA, GabD, AldB, TynA and YneI from bacteria, in particular E. coli

and
proteins with a polypeptide sequence wherein up to 60%, preferably up to 25%, particularly preferably up to 15%, in particular up to 10, 9, 8, 7, 6, 5, 4, 3, 2 or 1% of the amino acid residues compared to the aforementioned reference sequences are modified by deletion, insertion, substitution or a combination thereof and which still possess at least 50%, preferably 65%, particularly preferably 80%, in particular more than 90% of the activity of the protein with the corresponding, aforementioned reference sequence, wherein 100% activity of the reference protein is understood to mean the increasing of the activity of the cells used as a biocatalyst, i.e. the quantity of substance converted per unit time based on the cell quantity used (units per gram cell dry weight [U/g CDW]) in comparison to the activity of the biocatalyst in the absence of the reference protein, wherein the activity in this connection and in connection with the determination of the activity of the enzyme E₅ in general is understood to mean in particular the conversion of ω-oxolauric acid and/or methyl ω-oxolaurate to ω-carboxylauric acid and/or methyl ω-carboxylaurate.
alkL

[0072] In general, it can be advantageous for the microorganism according to the invention if it can secrete the ω-functionalized carboxylic acids and ω-functionalized carboxylate esters formed from the simple carbon source rapidly into the medium.

[0073] The organism advantageously achieves this in that the second genetic modification additionally comprises that the microorganism compared to its wild type forms more alkL gene product.

[0074] In connection with the present invention, the term “alkL gene product” is understood to mean proteins which fulfil at least one of the following two conditions:

1.) the protein is identified as a member of the superfamily of the OmpW proteins (protein family 3922 in the “Conserved Domain Database” (CDD) of the “National Center for Biotechnology Information” (NCBI)), where this assignment is made by alignment of the amino acid sequence of the protein with the database entries present in the CDD of the NCBI, which were deposited up to the 22.03.2010, with use of the standard search parameters, an e-value smaller than 0.01 and with use of the algorithm “blastp 2.2.23+”,
2.) in a search for conserved protein domains contained in the amino acid sequence concerned in the NCBI CDD (version 2.20) by means of RPS-BLAST, the presence of the conserved domain “OmpW, Outer membrane protein W” (COG3047) is identified with an e-value of less than 1×10⁻⁵ (“domain hit”).

[0075] Preferred gene products contained in the microorganism according to the invention alkL are characterized in that the production of the alkL gene product in the native host is induced by dicyclopropyl ketone; in this connection, it is also preferable that the expression of the alkL gene takes place as part of a group of genes, for example in a regulon such as for example an operon.

[0076] AlkL gene products contained in the microorganism according to the invention are preferably encoded by alkL genes from organisms selected from the group of the gram-negative bacteria, in particular the group containing, preferably consisting of, Pseudomonas sp., Azotobacter sp., Desulfitobacterium sp., Burkholderia sp., preferably Burkholderia cepacia, Xanthomonas sp., Rhodobacter sp., Ralstonia sp., Delftia sp. and Rickettsia sp., Oceanicaulis sp., Caulobacter sp., Marinobacter sp. and Rhodopseudomonas sp., preferably Pseudomonas putida, Oceanicaulis alexandrii, Marinobacter aquaeolei, in particular Pseudomonas putida GPo1 and P1, Oceanicaulis alexandrii HTCC2633, Caulobacter sp. K₃₁ and Marinobacter aquaeolei VT8. Quite especially preferred in this connection are alkL gene products encoded by the alkL genes from Pseudomonas putida GPo1 and P1, which are represented by Seq ID No. 1 and Seq ID No. 3, and proteins with polypeptide sequence Seq ID No. 2, Seq ID No. 4, Seq ID No. 5, Seq ID No. 6 or Seq ID No. 7 or with a polypeptide sequence wherein up to 60%, preferably up to 25%, particularly preferably up to 15%, in particular up to 10, 9, 8, 7, 6, 5, 4, 3, 2 or 1% of the amino acid residues are modified compared to Seq ID No. 2, Seq ID No. 4, Seq ID No. 5, Seq ID No. 6 or Seq ID No. 7 by deletion, insertion, substitution or a combination thereof and which still possess at least 50%, preferably 65%, particularly preferably 80%, in particular more than 90% of the activity of the protein with the respective reference sequence Seq ID No. 2, Seq ID No. 4, Seq ID No. 5, Seq ID No. 6 or Seq ID No. 7, wherein 100% activity of the reference protein is understood to mean the increasing of the activity of the cells used as a biocatalyst, i.e. the quantity of substance converted per unit time based on the cell quantity used (units per gram cell dry weight [U/g CDW]) in comparison to the activity of the biocatalyst in the absence of the reference protein, this being in a system as described in the practical examples, wherein glucose is converted to ω-aminolauric acid in an E. coli cell. A method of choice for the determination of the synthesis level can be found in the practical examples.

[0077] For the definition of the units, the definition usual in enzyme kinetics applies here: 1 unit of biocatalyst converts 1 μmol of substrate to the product in one minute.

[0078] 1 U=1 μmol/min.

### First Genetic Modification for Carboxylic Acid- and Carboxylate Ester-Synthesis

[0079] According to the invention, the microorganisms have a first genetic modification, so that compared to their wild type they are capable of forming more carboxylic acids and carboxylate ester from at least one simple carbon source.

[0080] In this connection, it is preferable according to the invention that the first genetic modification is, compared to the enzymatic activity of the wild type of the microorganism, increased activity of at least one of the enzymes selected from the group

Eᵢ Acyl-ACP (acyl carrier protein) thioesterase, preferably of EC 3.1.2.14 or EC 3.1.2.22, which catalyses the hydrolysis of an acyl-acyl carrier protein thioester,
Eᵢᵢ Acyl-CoA (coenzyme A) thioesterase, preferably of EC 3.1.2.2, EC 3.1.2.18, EC 3.1.2.19, EC 3.1.2.20 or EC 3.1.2.22, which catalyses the hydrolysis of an acyl-coenzyme A thioester,
E_{iib} Acyl-CoA (coenzyme A):ACP (acyl carrier protein) transacylase, which preferentially catalyses a reaction wherein a CoA thioester is converted into an ACP thioester,
Eᵢᵢᵢ Polyketide synthase, which catalyses a reaction which is also involved in the synthesis of carboxylic acids and carboxylate esters, and
Eᵢᵥ Hexanoic acid synthase, a specialized fatty acid synthase of the FAS-I type, which catalyses the synthesis of hexanoic acid from 2 molecules of malonyl-coenzyme A and one molecule of acetyl-coenzyme A.

### Specific Enzymes E₁

[0081] The reaction catalysed by Eᵢ differs from that catalysed by Eᵢᵢ only in that instead of an acyl-acyl carrier protein thioester an acyl-coenzyme A thioester is hydrolysed. It is obvious that because of significant side-activity many of the said enzymes Eᵢ can also be used as Eᵢᵢ and vice versa.

[0082] In cells preferred according to the invention, the enzyme Eᵢ is one which comprises sequences selected from:

AAC72881.1, ABB71579.1, CAC19934.1, AAC49180.1 (encoded by SEQ ID No. 10), AAC49783.1, AAC49179.1, CAB60830.1, ABB71581.1, AAC49269.1, CAC19933.1, CAA54060.1, AAC72882.1, Q39513.1, AAC49784.1, ABO38558.1, ABO38555.1, ABO38556.1, ABO38554.1, ADB79568.1, ADB79569.1, ACQ57188.1, ACQ57189.1, ABK96561.1, ACQ63293.1, ACQ57190.1, Q9SQI3.1, ABU96744.1, ABC47311.1, XP_{—}002324962.1, AAD01982.1, AAB51525.1, ACV40757.1, XP_{—}002309244.1, CBI28125.3, ABD91726.1, XP_{—}002284850.1, XP_{—}002309243.1, XP_{—}002515564.1, ACR56792.1, ACR56793.1, XP_{—}002892461.1, ABI18986.1, NP_{—}172327.1, CAA85387.1, CAA85388.1, ADA79524.1, ACR56795.1, ACR56794.1, CAN81819.1, ACF17654.1, AAB71729.1, ABH11710.1, ACQ57187.1, AAX51637.1, AAB88824.1, AAQ08202.1, AAB71731.1, AAX51636.1, CAC80370.1, CAC80371.1, AAG43858.1, ABD83939.1, AAD42220.2, AAG43860.1, AAG43861.1, AAG43857.1, AAL15645.1, AAB71730.1, NP_{—}001068400.1, EAY86877.1, NP_{—}001056776.1, XP_{—}002436457.1, NP_{—}001149963.1, ACN27901.1, EAY99617.1, ABL85052.1, XP_{—}002437226.1, NP_{—}001151366.1, ACF88154.1, NP_{—}001147887.1, XP_{—}002453522.1, BAJ99650.1, EAZ37535.1, EAZ01545.1, AAN17328.1, EAY86884.1, EEE57469.1, Q41635.1, AAM09524.1, Q39473.1, NP_{—}001057985.1, AAC49001.1, XP_{—}001752161.1, XP_{—}001770108.1, XP_{—}001784994.1, XP_{—}002318751.1, NP_{—}001047567.1, XP_{—}002322277.1, XP_{—}002299627.1, XP_{—}002511148.1, CBI15695.3, XP_{—}002299629.1, XP_{—}002280321.1, CAN60643.1, XP_{—}002459731.1, XP_{—}002975500.1, XP_{—}002962077.1, XP_{—}001773771.1, NP_{—}001151014.1, XP_{—}002317894.1, XP_{—}002971008.1, XP_{—}001774723.1, XP_{—}002280147.1, XP_{—}002526311.1, XP_{—}002517525.1, XP_{—}001764527.1, ABI20759.1, BAD73184.1, XP_{—}002987091.1, XP_{—}002985480.1, CBI26947.3, ABI20760.1, XP_{—}002303055.1, XP_{—}002885681.1, ADH03021.1, XP_{—}002532744.1, EAY74210.1, EEC84846.1, EEE54649.1, AAG35064.1, AAC49002.1, CAD32683.1, ACF78226.1, BAJ96402.1, XP_{—}002462626.1, NP_{—}001130099.1, XP_{—}002462625.1, ABX82799.3, Q42712.1, NP_{—}193041.1, AAB51524.1, NP_{—}189147.1, ABR18461.1, XP_{—}002863277.1, AAC72883.1, AAA33019.1, CBI40881.3, XP_{—}002262721.1, AAB51523.1, NP_{—}001063601.1, ADB79567.1, AAL77443.1, AAL77445.1, AAQ08223.1, AAL79361.1, CAA52070.1, AAA33020.1, CAA52069.1, XP_{—}001785304.1, CAC39106.1, XP_{—}002992591.1, XP_{—}002968049.1, XP_{—}001770737.1, XP_{—}001752563.1, AAG43859.1, XP_{—}002978911.1, XP_{—}002977790.1, ACB29661.1, XP_{—}002314829.1, XP_{—}002991471.1, EAZ45287.1, XP_{—}002986974.1, EEC73687.1, XP_{—}002312421.1, ACJ84621.1, NP_{—}001150707.1, AAD28187.1, XP_{—}001759159.1, XP_{—}001757193.1, XP_{—}002322077.1, ABE01139.1, XP_{—}002447294.1, AAX54515.1, AAD33870.1,
in particular
AAC72881.1, ABB71579.1, CAC19934.1, AAC49180.1 (encoded by SEQ ID No. 10), AAC49783.1, AAC49179.1, CAB60830.1, ABB71581.1, AAC49269.1, CAC19933.1, CAA54060.1, AAC72882.1, Q39513.1, AAC49784.1, AAC72883.1, Q41635.1, AAC49001.1,
and
proteins with a polypeptide sequence wherein up to 60%, preferably up to 25%, particularly preferably up to 15%, in particular up to 10, 9, 8, 7, 6, 5, 4, 3, 2 or 1% of the amino acid residues compared to the aforementioned reference sequences are modified by deletion, insertion, substitution or a combination thereof and which still possess at least 50%, preferably 65%, particularly preferably 80%, in particular more than 90% of the activity of the protein with the corresponding, aforementioned reference sequence, wherein 100% activity of the reference protein is understood to mean the increasing of the activity of the cells used as a biocatalyst, i.e. the quantity of substance converted per unit time based on the cell quantity used (units per gram cell dry weight [U/g CDW]) in comparison to the activity of the biocatalyst in the absence of the reference protein, wherein the activity in this connection and in connection with the determination of the activity of the enzyme Eᵢ in general is understood to mean in particular the hydrolysis of dodecanoyl-ACP thioesters.

[0083] Microorganisms preferred according to the invention are those which are obtained when the microorganisms listed below having a first genetic modification in the sense of the invention are used as the starting point, in that they are provided with the second genetic modification and optionally at least one further genetic modification in the sense of the invention.

[0084] WO2010063031 A2 describes, particularly in paragraphs [0007] to [0008], [0092] to [0100], [0135] to [0136], [0181] to [0186] and [0204] to [0213] and practical examples 4 to 8, microorganisms preferably used according to the invention which have a first genetic modification, so that compared to their wild type they are capable of forming more microbial oil from at least one simple carbon source. The document also describes enzymes Eᵢ preferred according to the invention and the sequences thereof, particularly in paragraphs [0012] to [0013], [0155], [0160] to [0163], [0185] to [0190] and [0197] to [0199], FIG. 12, practical examples 4 to 8 and table 3.

[0085] WO2010063032 A2 describes, particularly in paragraphs [0007] to [0008], [0092] to [0100], to [0136], [0181] to [0186] and [0204] to [0213], and practical examples 4 to 8, microorganisms preferably used according to the invention which have a first genetic modification, so that compared to their wild type they are capable of forming more microbial oil from at least one simple carbon source. The document also describes enzymes Eᵢ preferred according to the invention and the sequences thereof, particularly in paragraphs [0012] to [0013], [0155], [0160] to [0163], [0185] to [0190] and [0197] to [0199], FIG. 12, practical examples 4 to 8 and table 3.

[0086] WO2011003034 A2 describes, particularly on page 3, second paragraph to page 7, first paragraph, page 20, second paragraph, to page 22, second paragraph, and on page 156 to page 166, fifth paragraph, and in claims 1 to 100, microorganisms preferably used according to the invention which have a first genetic modification, so that compared to their wild type they are capable of forming more fatty acids and fatty acid derivatives, in particular adipic acid, from at least one simple carbon source. The document also describes enzymes Eᵢ preferred according to the invention and the sequences thereof particularly on page 35, third paragraph, and page 36, first paragraph.

[0087] WO2011008565 A1 describes, particularly in paragraphs [0018] to [0024] and [0086] to [0102] and practical examples 2, 4, 7, 9 and 10, microorganisms preferably used according to the invention which have a first genetic modification, so that compared to their wild type they are capable of forming more fatty acids and fatty acid derivatives, in particular fatty acids, fatty aldehydes, fatty alcohols, alkanes and fatty acid ester, from at least one simple carbon source. The document also describes enzymes Eᵢ preferred according to the invention and the sequences thereof, particularly in paragraphs [0009] to [0018] and [0073] to [0082], FIGS. 1 to 3 and 7, table 4, practical examples 1 to 10 and claims 1 to 5 and 11 to 13.

[0088] WO2009076559 A1 describes, particularly in paragraphs [0013] to [0051] and [0064] to [00111] and claims 1 to 10, microorganisms preferably used according to the invention which have a first genetic modification, so that compared to their wild type they are capable of forming more fatty acids and fatty acid derivatives, in particular fatty acids, fatty alcohols, alkanes or alkenes, from at least one simple carbon source. The document also describes enzymes Eᵢ preferred according to the invention and the sequences thereof, particularly in table 1, paragraphs [0021], to [0030] and [0064] to [00111] and FIG. 6.

[0089] WO2010017245 A1 describes, particularly in paragraphs [0011] to [0015] and [00114] to [00134], practical example 3 and claims 1 to 2 and 9 to 11, microorganisms preferably used according to the invention which have a first genetic modification, so that compared to their wild type they are capable of forming more fatty acids and fatty acid derivatives from at least one simple carbon source. The document also describes enzymes Eᵢ preferred according to the invention and the sequences thereof, particularly in tables 1, 2 and 3, paragraphs [0080] to and claims 3 to 8.

[0090] WO2010127318 A2 describes, particularly on pages 1 to 9 and 11 to 16, practical examples 1, 2 and 4, FIGS. 1A to 1E and claims 23 to 43, 62 to 79 and 101 to 120, microorganisms preferably used according to the invention which have a first genetic modification, so that compared to their wild type they are capable of forming more fatty acids and fatty acid derivatives, in particular biodiesel equivalents and other fatty acid derivatives, above all fatty acid ethyl esters, fatty acid esters, wax esters, fatty alcohols and fatty aldehydes, from at least one simple carbon source. The document also describes enzymes Eᵢ preferred according to the invention and the sequences thereof, particularly on pages 17 and 19 to 23.

[0091] WO2008100251 A1 describes, particularly on pages 4 to 7 and 45 to 46, FIGS. 1A to 1E and claims 9 to 13, microorganisms preferably used according to the invention which have a first genetic modification, so that compared to their wild type they are capable of forming more fatty acids and fatty acid derivatives, in particular fatty acid esters, wax esters and fatty alcohols, from at least one simple carbon source. The document also describes enzymes Eᵢ preferred according to the invention and the sequences thereof, particularly on pages 4 to 5 and 45 to 46.

[0092] WO2007136762 A2 describes, particularly on pages 2 to 4 and 17 to 18, table 7, FIGS. 2 to 4, practical examples 2 to 8 and claims 13 and 35, microorganisms preferably used according to the invention which have a first genetic modification, so that compared to their wild type they are capable of forming more fatty acids and fatty acid derivatives, in particular fatty acid esters, wax esters, hydrocarbons and fatty alcohols, from at least one simple carbon source. The document also describes enzymes Eᵢ preferred according to the invention and the sequences thereof, particularly on pages 17 to 18, in tables 1, 7, 8 and 10 and FIG. 10.

[0093] WO2008113041 A2 describes, particularly on pages 35 to 41 and 64 to 67, FIG. 2, practical examples 6 and 10 and claims 7 and 36, microorganisms preferably used according to the invention which have a first genetic modification, so that compared to their wild type they are capable of forming more fatty acids and fatty acid derivatives, in particular fatty acid esters, wax esters, hydrocarbons, aliphatic ketones and fatty alcohols, from at least one simple carbon source. The document also describes enzymes Eᵢ preferred according to the invention and the sequences thereof, particularly in FIG. 7 and practical examples 6 and 10.

[0094] WO2010126891 A1 describes, particularly in paragraphs [0034] to [0091], [0195] to [0222] and to [0250], FIGS. 3 to 5 and practical examples 1 to 5, microorganisms preferably used according to the invention which have a first genetic modification, so that compared to their wild type they are capable of forming more fatty acids and fatty acid derivatives, in particular fatty acid esters, wax esters and fatty alcohols, from at least one simple carbon source. The document also describes enzymes Eᵢ preferred according to the invention and the sequences thereof, particularly in paragraphs [0245] to [0250], table 1 and practical examples 1 to 5.

[0095] WO2010118410 A1 describes, particularly in paragraphs [0022] to [0043], [0158] to [0197], FIGS. 1 to 4, practical examples 3 and 5 to 8 and claims 1 to 53 and 82 to 100, microorganisms preferably used according to the invention which have a first genetic modification, so that compared to their wild type they are capable of forming more fatty acids and fatty acid derivatives, in particular fatty acid esters and wax esters, from at least one simple carbon source. The document also describes enzymes Eᵢ preferred according to the invention and the sequences thereof, particularly in paragraphs [0158] to [0197], table 1, FIGS. 3 and 4 and practical examples 3 and 5 to 8.

[0096] WO2010118409 A1 describes, particularly in paragraphs [0134] to [0154], FIGS. 1 to 3 and 6 and practical example 3, microorganisms preferably used according to the invention which have a first genetic modification, so that compared to their wild type they are capable of forming more fatty acids and fatty acid derivatives, in particular fatty acid esters and wax esters, from at least one simple carbon source. The document also describes enzymes Eᵢ preferred according to the invention and the sequences thereof, particularly in paragraphs [0134] to [0154], FIGS. 3 and 6 and practical example 3.

[0097] WO2010075483 A2 describes, particularly in paragraphs [0061] to [0090], and [0287] to [0367], FIGS. 1, 4 and 5, practical examples 1 to 38 and claims 18 to 26, microorganisms preferably used according to the invention which have a first genetic modification, so that compared to their wild type they are capable of forming more fatty acids and fatty acid derivatives, in particular fatty acids, fatty acid methyl esters, fatty acid ethyl esters, fatty alcohols, fatty alkyl acetates, fatty aldehydes, fatty amines, fatty amides, fatty sulphates, fatty ethers, ketones, alkanes, internal and terminal olefins, dicarboxylic acids, α,ω-dicarboxylic acids and α,ω-diols, from at least one simple carbon source. The document also describes enzymes Eᵢ preferred according to the invention and the sequences thereof, particularly in paragraphs [0012] to [0060], tables 7, 17, 26 and 27, FIGS. 1, 44 to 47 and 55 to 59, practical examples 1 to 38 and claims 1 to 17.

[0098] WO2010062480 A2 describes, particularly in paragraphs [0022] to [0174] and [0296] to [0330], practical examples 3 and 5 to 8 and claims 17 and 24, microorganisms preferably used according to the invention which have a first genetic modification, so that compared to their wild type they are capable of forming more fatty acids and fatty acid derivatives, in particular fatty alcohols, from at least one simple carbon source. The document also describes enzymes Eᵢ preferred according to the invention and the sequences thereof, particularly in paragraphs [0022] to [0174], table 1, and practical examples 3 and 5 to 8.

[0099] WO2010042664 A2 describes, particularly in paragraphs [0022] to [0143] and [0241] to [0275], practical example 2 and claims 3 and 9, microorganisms preferably used according to the invention which have a first genetic modification, so that compared to their wild type they are capable of forming more fatty acids and fatty acid derivatives, in particular fatty aldehydes, from at least one simple carbon source. The document also describes enzymes Eᵢ preferred according to the invention and the sequences, particularly in table 1, FIG. 5 and practical example 2.

[0100] WO2011008535 A1 describes, particularly in paragraphs [0024] to [0032], and [0138] to [0158] and FIG. 13, microorganisms preferably used according to the invention which have a first genetic modification, so that compared to their wild type they are capable of forming more fatty acids and fatty acid derivatives, in particular carboxylic acids, hydroxycarboxylic acids and lactones thereof, from at least one simple carbon source.

[0101] WO2010022090 A1 describes, particularly in paragraphs [0022] to [0143] and [0238] to [0275], FIGS. 3 to 5, practical example 2 and claims 5, 15, 16 and 36, microorganisms preferably used according to the invention which have a first genetic modification, so that compared to their wild type they are capable of forming more fatty acids and fatty acid derivatives, in particular fatty acid esters and wax esters, from at least one simple carbon source. The document also describes enzymes Eᵢ preferred according to the invention and the sequences thereof, particularly in table 1, FIG. 6 and practical example 2.

[0102] WO2009140695 A1 describes, particularly in paragraphs [0214] to [0248] and practical examples 22 to 24, microorganisms preferably used according to the invention which have a first genetic modification, so that compared to their wild type they are capable of forming more fatty acids and fatty acid derivatives, in particular hydrocarbons, from at least one simple carbon source. The document also describes enzymes Eᵢ preferred according to the invention and the sequences thereof in particular in table 1, FIG. 40 and practical examples 22 to 24.

[0103] WO2010021711 A1 describes, particularly in paragraphs [0009] to [0020] and [0257] to [0317], FIGS. 3 to 5 and 19, practical examples 2 to 24 and claims 4, 5 and 30, microorganisms preferably used according to the invention which have a first genetic modification, so that compared to their wild type they are capable of forming more fatty acids and fatty acid derivatives, in particular fatty acid esters and wax esters, from at least one simple carbon source. The document also describes enzymes Eᵢ preferred according to the invention and the sequences thereof, in particular in table 3, FIG. 6 and practical examples 2 to 24.

[0104] WO2009085278 A1 describes, particularly in paragraphs [0188] to [0192] and FIG. 10, microorganisms preferably used according to the invention which have a first genetic modification, so that compared to their wild type they are capable of forming more fatty acids and fatty acid derivatives, in particular olefins, from at least one simple carbon source. The document also describes enzymes Eᵢ preferred according to the invention and the sequences thereof, particularly in table 1 and FIG. 10.

[0105] WO2011019858 A1 describes, particularly in paragraphs [0023], [0064] to [0074] and [0091] to [0099], practical examples 1 to 13, FIG. 1 and claim 8, microorganisms preferably used according to the invention which have a first genetic modification, so that compared to their wild type they are capable of forming more fatty acids and fatty acid derivatives, in particular fatty alcohols, from at least one simple carbon source. The document also describes preferred enzymes Eᵢ according to the invention and the sequences thereof, particularly in paragraphs [0085] to [0090], practical examples 1 to 13 and table 1.

[0106] WO2009009391 A2 describes, particularly in paragraphs [0010] to [0019] and [0191] to [0299], FIGS. 3 to 5, practical examples 2, 4 to 6, 9 to 14, 17 and 19 and claims 16, 39, 44 and 55 to 59, microorganisms preferably used according to the invention which have a first genetic modification, so that compared to their wild type they are capable of forming more fatty acids and fatty acid derivatives, in particular fatty acid esters, wax esters and fatty alcohols, from at least one simple carbon source. The document also describes enzymes Eᵢ preferred according to the invention and the sequences thereof, particularly in paragraphs [0010] to [0019] and [0191] to [0299], FIG. 9 and practical examples 2, 4 to 6, 9 to 14, 17 and 19.

[0107] WO2008151149 A2 describes, particularly in paragraphs [0009], [0015] to [0033], [0053], [0071], [0174] to [0191], [0274] and [0396], claims 53 to 114, 188 to 206 and 344 to 355 and tables 1 to 3, microorganisms preferably used according to the invention which have a first genetic modification, so that compared to their wild type they are capable of forming more microbial oil from at least one simple carbon source. The document also describes enzymes Eᵢ preferred according to the invention and the sequences thereof, particularly in table 5.

[0108] WO2008147781 A2 describes, particularly in paragraphs [0147] to [0156], practical examples 1 to 3, 8, 9 and 14 and claims 65 to 71, microorganisms preferably used according to the invention which have a first genetic modification, so that compared to their wild type they are capable of forming more fatty acids and fatty acid derivatives, in particular hydrocarbons, olefins and aliphatic ketones, from at least one simple carbon source. The document also describes enzymes Eᵢ preferred according to the invention and the sequences thereof in particular in practical examples 1 to 3, 8, 9 and 14.

[0109] WO2008119082 A2 describes, particularly on pages 3 to 5, 8 to 10 and 40 to 77, in FIGS. 4 and 5, practical examples 2 to 5 and 8 to 18 and claims 3 to 39 and 152 to 153, microorganisms preferably used according to the invention which have a first genetic modification, so that compared to their wild type they are capable of forming more fatty acids and fatty acid derivatives, in particular fatty acid esters, wax esters, triglycerides, biodiesel, gasoline, aviation fuel and fatty alcohols from at least one simple carbon source. The document also describes enzymes Eᵢ preferred according to the invention and the sequences thereof, particularly in table 1, FIG. 1, practical examples 2 to 5 and 8 to 18 and claims 124 to 134 and 138 to 141.

[0110] WO2010135624 A2 describes, particularly in paragraphs [0067] to [0083], and [0095] to [0098], microorganisms preferably used according to the invention which have a first genetic modification, so that compared to their wild type they are capable of forming more fatty acids and fatty acid derivatives, in particular fatty alcohols, from at least one simple carbon source. The document also describes enzymes Eᵢ preferred according to the invention and the sequences thereof, particularly in paragraphs [0067] to [0083] and [0095] to [0098]. Zheng Z, Gong Q, Liu T, Deng Y, Chen J C and Chen G Q. (Thioesterase II of Escherichia coli plays an important role in 3-hydroxydecanoic acid production. Appl Environ Microbiol. 2004. 70(7):3807-13) describe, particularly on pages 3808 to 3810 and 3012 and table 1, 3 and 4, microorganisms preferably used according to the invention which have a first genetic modification, so that compared to their wild type they are capable of forming more fatty acids and fatty acid derivatives, in particular fatty acid esters, wax esters and fatty alcohols, from at least one simple carbon source. The document also describes enzymes Eᵢ preferred according to the invention and the sequences thereof, particularly on pages 3807 and in table 2. Steen E J, Kang Y, Bokinsky G, Hu Z, Schirmer A, McClure A, Del Cardayre S B and Keasling J D (Microbial production of fatty acid-derived fuels and chemicals from plant biomass. Nature. 2010. 463(7280):559-62) describe, particularly on p. 559, third paragraph, to p. 559, first paragraph, microorganisms preferably used according to the invention which have a first genetic modification, so that compared to their wild type they are capable of forming more fatty acids and fatty acid derivatives, in particular fatty acids and fatty acid esters, from at least one simple carbon source. The document also describes enzymes Eᵢ preferred according to the invention and the sequences thereof, in particular in supplementary table 1.

[0111] Lennen R M, Braden D J, West R A, Dumesic J A and Pfleger B F (A process for microbial hydrocarbon synthesis: Overproduction of fatty acids in Escherichia coli and catalytic conversion to alkanes. Biotechnol Bioeng. 2010. 106(2):193-202) describe, particularly on p. 193, first paragraph, p. 194, first and second paragraph, p. 195, second paragraph to p. 197, second paragraph, p. 198, second paragraph to p. 199, third paragraph, microorganisms preferably used according to the invention which have a first genetic modification, so that compared to their wild type they are capable of forming more fatty acids and fatty acid derivatives, in particular fatty acids and fatty acid esters, from at least one simple carbon source. The document also describes enzymes Eᵢ preferred according to the invention and the sequences thereof, in particular on p. 193, first paragraph, p. 194, first and second paragraph, p. 196, second paragraph, and in the supplementary material.

[0112] Liu T, Vora H and Khosla C. (Quantitative analysis and engineering of fatty acid biosynthesis in E. coli. Metab Eng. 2010 July; 12(4):378-86.) describe, particularly in sections 2.2, and 3.1 and in table 1 and 2, microorganisms preferably used according to the invention which have a first genetic modification, so that compared to their wild type they are capable of forming more fatty acids and fatty acid derivatives, in particular fatty acids and fatty acid esters, from at least one simple carbon source. The document also describes enzymes E₁ preferred according to the invention and the sequences thereof, in particular in table 1.

[0113] Yuan L, Voelker T A and Hawkins D J. (Modification of the substrate specificity of an acyl-acyl carrier protein thioesterase by protein engineering. Proc Natl Acad Sci USA. 1995 Nov. 7; 92(23):10639-43) describe, particularly on p. 10641, fourth paragraph, and in FIG. 2 and table 1, microorganisms preferably used according to the invention which have a first genetic modification, so that compared to their wild type they are capable of forming more fatty acids and fatty acid derivatives, in particular fatty acids and fatty acid esters, from at least one simple carbon source. The document also describes enzymes Eᵢ preferred according to the invention and the sequences thereof, in particular on p. 10639 first paragraph, p. 10640, second, third and last paragraph, p. 10641, second and third paragraph, and in FIG. 1 and table 1 and 2.

[0114] Liu X, Vora H and Khosla C. (Overproduction of free fatty acids in E. coli: implications for biodiesel production. Metab Eng. 2008. 10(6):333-9.) describe, particularly on p. 334, second paragraph, paragraphs 2.2, 2.3 and 3 (first to fourth paragraph) and in table 1, microorganisms preferably used according to the invention which have a first genetic modification, so that compared to their wild type they are capable of forming more fatty acids and fatty acid derivatives, in particular fatty acids and fatty acid esters, from at least one simple carbon source. The document also describes enzymes Eᵢ preferred according to the invention and the sequences thereof, in particular in paragraph 2.2.

[0115] Liu X, Sheng J and Curtiss IIII R. (Fatty acid production in genetically modified cyanobacteria. Proc Natl Acad Sci USA. 2011. 108(17):6899-904) describe, particularly on p. 6899, fourth and last paragraph, p. 6900, first to penultimate paragraph, and in table S1 of the “Supporting Information”, microorganisms preferably used according to the invention which have a first genetic modification, so that compared to their wild type they are capable of forming more fatty acids and fatty acid derivatives, in particular fatty acids and fatty acid esters, from at least one simple carbon source. The document also describes enzymes Eᵢ preferred according to the invention and the sequences thereof, in particular on p. 6899, sixth and last paragraph.

### Specific Enzymes Eᵢᵢ

[0116] Microorganisms preferred according to the invention are those which are obtained when the microorganisms listed below having a first genetic modification in the sense of the invention are used as the starting point, in that they are provided with the second genetic modification and optionally at least one further genetic modification in the sense of the invention.

[0117] Steen E J, Kang Y, Bokinsky G, Hu Z, Schirmer A, McClure A, Del Cardayre S B and Keasling J D (Microbial production of fatty-acid-derived fuels and chemicals from plant biomass. Nature. 2010. 463(7280):559-62) describe, particularly on p. 559, third paragraph, to p. 559, first paragraph, microorganisms preferably used according to the invention which have a first genetic modification, so that compared to their wild type they are capable of forming more carboxylic acids and carboxylate esters, in particular fatty acids and fatty acid esters, from at least one simple carbon source. The document also describes enzymes Eᵢᵢ preferred according to the invention and the sequences thereof, in particular in supplementary table 1.

[0118] Lennen R M, Braden D J, West R A, Dumesic J A and Pfleger B F (A process for microbial hydrocarbon synthesis: Overproduction of fatty acids in Escherichia coli and catalytic conversion to alkanes. Biotechnol Bioeng. 2010. 106(2):193-202) describe, particularly on p. 193, first paragraph, p. 194, first and second paragraph, p. 195, second paragraph to p. 197, second paragraph, p. 198, second paragraph to p. 199, third paragraph, microorganisms preferably used according to the invention which have a first genetic modification, so that compared to their wild type they are capable of forming more carboxylic acids and carboxylate esters, in particular fatty acids and fatty acid esters, from at least one simple carbon source. The document also describes enzymes Eᵢᵢ preferred according to the invention and the sequences thereof, in particular on p. 193, first paragraph, p. 194, first and second paragraph, p. 196, second paragraph, and in the supplementary material.

[0119] Liu T, Vora H and Khosla C. (Quantitative analysis and engineering of fatty acid biosynthesis in E. coli. Metab Eng. 2010 July; 12(4):378-86.) describe, particularly in sections 2.2, and 3.1 and in table 1 and 2, microorganisms preferably used according to the invention which have a first genetic modification, so that compared to their wild type they are capable of forming more carboxylic acids and carboxylate esters, in particular fatty acids and fatty acid esters, from at least one simple carbon source. The document also describes enzymes Eᵢᵢ preferred according to the invention and the sequences thereof, in particular in table 1.

[0120] Yuan L, Voelker T A and Hawkins D J. (Modification of the substrate specificity of an acyl-acyl carrier protein thioesterase by protein engineering. Proc Natl Acad Sci USA. 1995 Nov. 7; 92(23):10639-43) describe, particularly on p. 10641, fourth paragraph, and in FIG. 2 and table 1 microorganisms preferably used according to the invention which have a first genetic modification, so that compared to their wild type they are capable of forming more carboxylic acids and carboxylate esters, in particular fatty acids and fatty acid esters, from at least one simple carbon source. The document also describes enzymes Eᵢᵢ preferred according to the invention and the sequences thereof, in particular on p. 10639 first paragraph, p. 10640, second, third and last paragraph, p. 10641, second and third paragraph, and in FIG. 1 and table 1 and 2.

[0121] Liu X, Vora H and Khosla C. (Overproduction of free fatty acids in E. coli: implications for biodiesel production. Metab Eng. 2008. 10(6):333-9.) describe, particularly on p. 334, second paragraph, paragraphs 2.2, 2.3 and 3 (first to fourth paragraph) and in table 1, microorganisms preferably used according to the invention which have a first genetic modification, so that compared to their wild type they are capable of forming more carboxylic acids and carboxylate esters, in particular fatty acids and fatty acid esters, from at least one simple carbon source. The document also describes enzymes E_{d} preferred according to the invention and the sequences thereof, in particular in paragraph 2.2.

[0122] Liu X, Sheng J and Curtiss IIII R. (Fatty acid production in genetically modified cyanobacteria. Proc Natl Acad Sci USA. 2011. 108(17):6899-904) describe, particularly on p. 6899, fourth and last paragraph, p. 6900, first to penultimate paragraph, and in table S1 of the “Supporting Information”, microorganisms preferably used according to the invention which have a first genetic modification, so that compared to their wild type they are capable of forming more carboxylic acids and carboxylate esters, in particular fatty acids and fatty acid esters, from at least one simple carbon source. The document also describes enzymes Eᵢ preferred according to the invention and the sequences thereof, in particular on p. 6899, sixth and last paragraph.

### Specific Enzymes Eᵢᵢᵢ

[0123] Microorganisms preferred according to the invention are those which are obtained when the microorganisms listed below having a first genetic modification in the sense of the invention are used as the starting point, in that they are provided with the second genetic modification and optionally at least one further genetic modification in the sense of the invention.

[0124] WO2009121066 A1 describes, particularly in claims 8 to 14, microorganisms preferably used according to the invention which have a first genetic modification, so that compared to their wild type they are capable of forming more fatty acids and fatty acid derivatives, in particular dicarboxylic acids, from at least one simple carbon source. The document also describes enzymes Eᵢᵢᵢ preferred according to the invention and the sequences thereof, particularly in paragraphs [00026] to [0054], practical examples 1 to 6, FIGS. 4 to 10 and claims 1 to 7.

[0125] WO2009134899 A1 describes, particularly in paragraphs [0079] to [0082], practical example 1 and claim 20, microorganisms preferably used according to the invention which have a first genetic modification, so that compared to their wild type they are capable of forming more fatty acids and fatty acid derivatives, in particular carboxylic acids, hydroxycarboxylic acids and lactones thereof, from at least one simple carbon source. The document also describes enzymes Eᵢᵢᵢ preferred according to the invention and the sequences thereof, particularly in paragraphs [0009] to [0010] and [0044] to [0078], practical example 1, FIGS. 1 and 5 to 8 and claims 15 to 17 and 19.

### Specific Enzymes Eᵢᵥ

[0126] In cells preferred according to the invention, the enzyme is one which comprises sequences selected from:

AAS90071.1, XP_{—}002379948.1, AAS90024.1, XP_{—}001821514.2, BAE59512.1, AAL99898.1, AAS90001.1, AAS90049.1, XP_{—}001911518.1, ACH72901.1, XP_{—}681084.1, AAC49198.1, EFW18013.1, XP_{—}003070494.1, XP_{—}001241401.1, XP_{—}002384449.1, XP_{—}001827206.1, XP_{—}002836001.1, XP_{—}001393196.1, XP_{—}660984.1, XP_{—}001395284.1, XP_{—}002148677.1, XP_{—}001827151.2, BAE66018.1, XP_{—}001217254.1, CAK40139.1, XP_{—}001393516.2, XP_{—}002477829.1, XP_{—}002146311.1, XP_{—}002340042.1, XP_{—}002544942.1, CBF87553.1, XP_{—}002149766.1, 2UV8_A, XP_{—}682676.1, CBX98966.1, XP_{—}002560069.1, XP_{—}001273102.1, P15368.1, XP_{—}001273530.1, CBX99714.1, AAB41493.1, XP_{—}001823764.1, XP_{—}001388458.1, XP_{—}748738.1, EDP53207.1, XP_{—}001259179.1, XP_{—}001825741.2, BAE64608.1, XP_{—}001213437.1, XP_{—}002377327.1, XP_{—}002152724.1, EFZ04065.1, XP_{—}001792784.1, EGP89632.1, XP_{—}001407660.1, EFQ31023.1, XP_{—}003040066.1, 2UV9_A, XP_{—}002486436.1, XP_{—}001585982.1, EFY87204.1, XP_{—}002620504.1, XP_{—}003295647.1, EEQ86108.1, XP_{—}001938586.1, XP_{—}001547465.1, XP_{—}001906653.1, XP_{—}001402457.2, CAK40502.1, XP_{—}002568116.1, XP_{—}003230922.1, XP_{—}001647236.1, XP_{—}385497.1, EGD94294.1, EGE05134.1, XP_{—}002849847.1, XP_{—}003015737.1, EFX06093.1, XP_{—}003019052.1, EEH03423.1, XP_{—}001942351.1, EGC45478.1, XP_{—}002556020.1, XP_{—}003011025.1, CAY86729.1, EDN60916.1, EGA84463.1, EGA56454.1, EEU05652.1, NP_{—}015093.1, XP_{—}003231214.1, XP_{—}445956.1, EGA60201.1, XP_{—}003349949.1, XP_{—}003070417.1, XP_{—}001241314.1, EGR48038.1, XP_{—}002615278.1, EFW15042.1, EGO59647.1, XP_{—}452914.1, XP_{—}962466.1, XP_{—}001537327.1, XP_{—}002796517.1, XP_{—}003305240.1, XP_{—}002543037.1, XP_{—}002499262.1, NP_{—}985412.2, XP_{—}003019770.1, EFW96269.1, XP_{—}002843350.1, EEH43965.1, XP_{—}457388.1, XP_{—}001799391.1, EEH21370.1, BAD08376.1, XP_{—}001486434.1, BAF79876.1, EFY90998.1, XP_{—}001939431.1, EER44845.1, EFZ02060.1, XP_{—}001386834.2, XP_{—}501096.1, XP_{—}003299758.1, XP_{—}002419391.1, XP_{—}002490414.1, ACZ66251.1, XP_{—}002548204.1, P43098.1, XP_{—}002176039.1, XP_{—}002479407.1, EEQ44526.1, AAA34601.1, XP_{—}001791764.1, XP_{—}003009337.1, BAA11913.1, NP_{—}593823.1, BAB62031.1, BAB62032.1, BAB62030.1, 2 PFF_A, XP_{—}380212.1, ADN94478.1, EGF83443.1, XP_{—}681149.1, EGG00662.1, ADN94479.1, ABC94883.1, XP_{—}571099.1, EFY94095.1, EFW39589.1, XP_{—}003194430.1, XP_{—}003031600.1, XP_{—}001836417.1, XP_{—}001880844.1, XP_{—}762607.1, EGN98830.1, EGO24420.1, ACD87451.1, XP_{—}003328630.1, XP_{—}002997955.1, CCA25392.1, XP_{—}002901724.1, EFY86381.1, XP_{—}002901728.1, ADN97213.1, XP_{—}759118.1, XP_{—}003325251.1, XP_{—}003169619.1, XP_{—}002555446.1, ABJ98780.1, XP_{—}723161.1, EDZ68993.1, XP_{—}001526334.1, XP_{—}001223165.1, YP_{—}889015.1, AAO43178.1, YP_{—}001702252.1, XP_{—}003026305.1, YP_{—}003659808.1, ZP_{—}08155637.1, ZP_{—}04749666.1, ZP_{—}08022190.1, YP_{—}004007770.1, YP_{—}954908.1, YP_{—}004522637.1, YP_{—}640811.1, ZP_{—}04448562.1, NP_{—}301868.1, ZP_{—}06851996.1, YP_{—}003273140.1, YP_{—}001071929.1, YP_{—}001133797.1, YP_{—}004076455.1, YP_{—}701403.1, ZP_{—}03324816.1, YP_{—}002778327.1, ZP_{—}02028077.1, YP_{—}909119.1, YP_{—}880884.1, YP_{—}002767320.1, NP_{—}961266.1, ZP_{—}07457010.1, ZP_{—}08206945.1, ZP_{—}02917151.1, ZP_{—}04387794.1, YP_{—}003359863.1, EGO39886.1, ABE96385.1, ZP_{—}05228143.1, ZP_{—}06522069.1, EGL13180.1, ZP_{—}06976698.1, YP_{—}001852225.1, ZP_{—}06596502.1, YP_{—}907384.1, ZP_{—}06518033.1, AEF27803.1, YP_{—}003374392.1, ZP_{—}07485570.1, NP_{—}217040.1, ZP_{—}03742148.1, NP_{—}856198.1, YP_{—}004724192.1, NP_{—}337093.1, AEJ51135.1, ZP_{—}05765008.1, YP_{—}004745991.1, AEJ47516.1, ZP_{—}06927266.1, ZP_{—}03646962.1, AEF31807.1, YP_{—}003939358.1, YP_{—}003971698.1, YP_{—}003986333.1, ZP_{—}05750911.1, ADD61451.1, ZP_{—}07942485.1, YP_{—}004209716.1, YP_{—}004221489.1, AEI96705.1, NP_{—}696693.1, AEG82252.1, YP_{—}004001156.1, ZP_{—}03976473.1, ZP_{—}04663991.1, ZP_{—}00121397.1, YP_{—}003662064.1, YP_{—}003646283.1, YP_{—}004630447.1, YP_{—}002323720.1, YP_{—}002835610.1, YP_{—}117466.1, ZP_{—}02963252.1, ADC85342.1, NP_{—}940183.1, NP_{—}739002.1, ZP_{—}06755645.1, ADL21513.1, YP_{—}003784047.1, ADL11108.1, ZP_{—}06608499.1, ZP_{—}07967121.1, ZP_{—}05966223.1, ZP_{—}08682531.1, ZP_{—}03918327.1, ZP_{—}07879655.1, ZP_{—}03972703.1, ZP_{—}06162645.1, ZP_{—}06837277.1, ZP_{—}07990916.1, ZP_{—}03394081.1, CAA46024.1, YP_{—}004760934.1, ZP_{—}06751771.1, ZP_{—}03934033.1, NP_{—}601696.1, BAB99888.1, YP_{—}001139316.1, ZP_{—}03926457.1, NP_{—}737523.1, ZP_{—}02044858.1, ZP_{—}07404023.1, ZP_{—}03709883.1, XP_{—}002388648.1, ZP_{—}07402466.1, ZP_{—}03710807.1, ZP_{—}08294093.1, ZP_{—}08232611.1, XP_{—}682514.1, ZP_{—}06837028.1, YP_{—}001137826.1, CAA61087.1, ZP_{—}06043461.1, YP_{—}002833817.1, YP_{—}225128.1, NP_{—}600065.1, ABU23831.1, ZP_{—}07716892.1, ZP_{—}03935133.1, ZP_{—}02549600.1, ZP_{—}05215994.1, YP_{—}004494858.1, XP_{—}001526333.1, AAS90085.1, XP_{—}002379947.1, AAS90025.1, XP_{—}001821515.1, AAL99899.1, AAS90002.1, AAS90050.1, XP_{—}001911517.1, ACH72900.1, XP_{—}681083.1, AAC49199.1, XP_{—}003070495.1, XP_{—}001241402.1, EFW18012.1, CBX98970.1, EEH03422.1, EEQ86107.1, EGC45479.1, XP_{—}002620503.1, XP_{—}001537328.1, XP_{—}002796516.1, 2UVA_G, EEH43966.1, DAA05950.1, EGR47893.1, XP_{—}003070418.1, XP_{—}001241316.1, XP_{—}001827193.1, XP_{—}002384436.1, XP_{—}682677.1, XP_{—}002486435.1, EGP88608.1, EDP53206.1, XP_{—}001259180.1, EEH21369.1, XP_{—}002543038.1, XP_{—}748739.1, XP_{—}003015735.1, EGE05135.1, XP_{—}002152723.1, XP_{—}002560068.1, XP_{—}001273529.1, XP_{—}003230923.1, EFX05327.1, XP_{—}003019051.1, XP_{—}001585981.1, XP_{—}361644.2, XP_{—}001223166.1, XP_{—}003349948.1, XP_{—}002380737.1, AAB41494.1, XP_{—}001823765.1, XP_{—}962465.1, EGO59648.1, XP_{—}001906652.1, XP_{—}003039864.1, XP_{—}001213436.1, XP_{—}385498.1, XP_{—}003295646.1, EFQ31022.1, XP_{—}002849848.1, XP_{—}002148679.1, CBX99715.1, XP_{—}002149767.1, EFY87205.1, EFZ04064.1, XP_{—}002340041.1, EGD94295.1, XP_{—}001938587.1, CAK45758.1, XP_{—}001792785.1, XP_{—}001393189.2, XP_{—}003169620.1, XP_{—}001547461.1, XP_{—}001217253.1, XP_{—}001939430.1, BAA92930.1, Q92215.1, EDK38075.2, EFW97345.1, XP_{—}002495511.1, XP_{—}451653.1, XP_{—}500912.1, CAA42211.1, XP_{—}001486502.1, XP_{—}002477835.1, XP_{—}445436.1, NP_{—}594370.1, XP_{—}001827152.2, BAE66019.1, BAA36384.1, BAB62141.1, XP_{—}003299759.1, XP_{—}002553365.1, XP_{—}002489642.1, 2UV8_G, XP_{—}457311.1, CAY80909.1, XP_{—}001395285.1, EGA61562.1, EDN60099.1, EDV12927.1, NP_{—}012739.1, XP_{—}002616181.1, XP_{—}002420328.1, XP_{—}001524822.1, XP_{—}002550943.1, XP_{—}001386364.2, NP_{—}984945.2, 227846, AAB59310.1, XP_{—}001646561.1, XP_{—}716877.1, XP_{—}001836417.1, XP_{—}002146312.1, P34731.1, EGO24420.1, XP_{—}002544941.1, EFZ02054.1, XP_{—}002175228.1, XP_{—}001393490.2, XP_{—}003031600.1, XP_{—}002479408.1, XP_{—}002568119.1, XP_{—}001825735.2, XP_{—}002377320.1, EGN98830.1, ACD87451.1, XP_{—}001880844.1, XP_{—}571100.1, ABC94882.1, XP_{—}775164.1, BAE64602.1, EFY90992.1, XP_{—}003194424.1, XP_{—}001273103.1, XP_{—}681142.1, XP_{—}003011020.1, AAA34602.1, XP_{—}003231209.1, XP_{—}003019765.1, ADN94478.1, EEQ46070.1, XP_{—}001799393.1, CAK40504.1, AAM75418.1, ADN94479.1, XP_{—}002843356.1, CAA27616.1, XP_{—}380213.1, ADN97213.1, XP_{—}759118.1, XP_{—}762607.1, CAK49094.1, EER44843.1, XP_{—}003009335.1, XP_{—}002997955.1, XP_{—}002901724.1, CCA25392.1, CAK36856.1, XP_{—}001388457.2, ABO37974.1, ABJ98780.1, XP_{—}660985.1, EDZ71063.1, XP_{—}001402459.2, XP_{—}001791765.1, XP_{—}003324647.1, EGG10429.1, EFW15039.1, XP_{—}002384390.1, XP_{—}003031976.1, EDZ71062.1, EFW39589.1, ACZ80683.1, XP_{—}002901728.1, XP_{—}003328630.1, XP_{—}681125.1, XP_{—}003325251.1,
and
proteins with a polypeptide sequence wherein up to 60%, preferably up to 25%, particularly preferably up to 15%, in particular up to 10, 9, 8, 7, 6, 5, 4, 3, 2 or 1% of the amino acid residues compared to the aforementioned reference sequences are modified by deletion, insertion, substitution or a combination thereof and which still possess at least 50%, preferably 65%, particularly preferably 80%, in particular more than 90% of the activity of the protein with the corresponding, aforementioned reference sequence, wherein 100% activity of the reference protein is understood to mean the increasing of the activity of the cells used as a biocatalyst, i.e. the quantity of substance converted per unit time based on the cell quantity used (units per gram cell dry weight [U/g CDW]) in comparison to the activity of the biocatalyst in the absence of the reference protein, wherein the activity in this connection and in connection with the determination of the activity of the enzyme Eᵢᵥ in general is understood to mean in particular the conversion to hexanoic acid from 2 molecules of malonyl-coenzyme A and one molecule of acetyl-coenzyme A.

[0127] Microorganisms preferred according to the invention are those which are obtained when the microorganisms listed below having a first genetic modification in the sense of the invention are used as the starting point, in that they are provided with the second genetic modification and optionally at least one further genetic modification in the sense of the invention.

[0128] WO2011003034 A2 describes, particularly on p. 2 to 3, p. 5 third paragraph, in practical examples 1 to 4, 7 to 9 and 12 to 14 and claims 1 to 100, microorganisms preferably used according to the invention which have a first genetic modification, so that compared to their wild type they are capable of forming more fatty acids and fatty acid derivatives, in particular hexanoic acid, from at least one simple carbon source. The document also describes enzymes Eᵢᵥ preferred according to the invention and the sequences thereof, particularly on p. 5 and in practical example 3.

[0129] Hitchman T S, Schmidt E W, Trail F, Rarick M D, Linz J E and Townsend C A. (Hexanoate synthase, a specialized type I fatty acid synthase in aflatoxin B1 biosynthesis. Bioorg Chem. 2001. 29(5):293-307) describe, particularly on p. 296, penultimate paragraph, to p. 298, second paragraph, microorganisms preferably used according to the invention which have a first genetic modification, so that compared to their wild type they are capable of forming more fatty acids and fatty acid derivatives, in particular hexanoic acid, from at least one simple carbon source. The document also describes enzymes Eᵢᵥ preferred according to the invention and the sequences thereof in in particular p. 299, fourth paragraph, to p. 302, first paragraph.

[0130] In connection with the first genetic modification, it can be beneficial instead of the enzyme Eᵢ to use a combination of increasing the activity of an enzyme Eᵢᵢ compared to that of the wild type paired with that of an enzyme E_{iib} which catalyses a reaction wherein a CoA thioester is converted into an ACP thioester.

[0131] Suitable enzymes E_{iib} are known as acyl-CoA (coenzyme A):ACP (acyl carrier protein) transacylases. Preferred enzymes E_{iib} are selected from

XP_{—}003402554.1, YP_{—}002908243.1, YP_{—}001778804.1, YP_{—}001670627.1, YP_{—}004703658.1, YP_{—}001747923.1, YP_{—}004348703.1, YP_{—}004352505.1, YP_{—}004379169.1, ADR61731.1, YP_{—}001269622.1, YP_{—}001186851.1, YP_{—}004659609.1, YP_{—}003519049.1, YP_{—}001811696.1, YP_{—}004616040.1, NP_{—}252697.1, NP_{—}252169.1, NP_{—}249421.1, ZP_{—}06456665.1, ZP_{—}01167071.1, ZP_{—}08557569.1, ZP_{—}08554397.1, YP_{—}001157914.1, YP_{—}004475334.1, EGM20156.1, BAK10182.1, YP_{—}347066.1, Q9KJH8.1, YP_{—}002987902.1, ZP_{—}03794633.1, ZP_{—}03627777.1, YP_{—}004434330.1, NP_{—}743567.1, ZP_{—}03456835.1, ZP_{—}07911512.1, ZP_{—}07264431.1, ZP_{—}02265387.2, ZP_{—}03456013.1, ZP_{—}07577798.1, ZP_{—}08429367.1, YP_{—}004055319.1, YP_{—}004053883.1, YP_{—}275219.1, YP_{—}276116.1, YP_{—}003882762.1, EGH97259.1, EGH95622.1, EGH90852.1, EGH85976.1, EGH81248.1, EGH79586.1, EGH79549.1, EGH73565.1, EGH66549.1, EGH64812.1, EGH58099.1, EGH54896.1, EGH50352.1, EGH43364.1, EGH41593.1, EGH29888.1, EGH29417.1, EGH22392.1, EGH22129.1, EGH11618.1, EGH10011.1, ZP_{—}04589662.1, CCA60711.1, YP_{—}003004716.1, BAK16630.1, YP_{—}003264146.1, YP_{—}371314.1, YP_{—}439272.1, NP_{—}762892.1, ADW02533.1, YP_{—}003291774.1, EGC99875.1, ZP_{—}08139631.1, YP_{—}003333890.1, EGC08366.1, YP_{—}080427.1, YP_{—}258557.1, YP_{—}001985016.1, YP_{—}002875182.1, YP_{—}002871082.1, YP_{—}237050.1, YP_{—}236199.1, NP_{—}794008.1, NP_{—}793082.1, YP_{—}609790.1, EFW81598.1, EFW79804.1, ZP_{—}07261632.1, ZP_{—}07229875.1, ZP_{—}06458504.1, ZP_{—}05640568.1, ZP_{—}03399268.1, ZP_{—}03398232.1, ZP_{—}08004496.1, ZP_{—}06876938.1, ZP_{—}03227482.1, ZP_{—}02511781.1, ZP_{—}02503964.1, ZP_{—}02477255.1, ZP_{—}02466678.1, ZP_{—}02465791.1, ZP_{—}02461688.1, ZP_{—}02417235.1, ZP_{—}02414413.1, ZP_{—}02408727.1, ZP_{—}02376540.1, ZP_{—}02358949.1, ZP_{—}07778021.1, ZP_{—}07774051.1, ZP_{—}07795409.1, ZP_{—}07089008.1, YP_{—}776393.1, ZP_{—}07684652.1, ZP_{—}06640022.1, ZP_{—}03054335.1, ZP_{—}02907621.1, ZP_{—}02891475.1, ZP_{—}01862226.1, ZP_{—}01769192.1, ZP_{—}01367441.1, ZP_{—}01366930.1, ZP_{—}01364106.1, ZP_{—}01312991.1, ZP_{—}01173135.1, ZP_{—}07005523.1, ZP_{—}04955702.1, ZP_{—}04943305.1, ZP_{—}04936014.1, ZP_{—}04932415.1, ZP_{—}04930223.1, ZP_{—}04905334.1, ZP_{—}04893870.1, ZP_{—}04893165.1, ZP_{—}04892059.1, ZP_{—}04884056.1, YP_{—}002438575.1, YP_{—}002234939.1, YP_{—}001488024.1, YP_{—}001346487.1, YP_{—}001350135.1, YP_{—}001347031.1, YP_{—}990329.1, YP_{—}860279.1, YP_{—}789111.1, YP_{—}792557.1, YP_{—}623139.1, YP_{—}175644.1, YP_{—}111362.1, YP_{—}110557.1, YP_{—}105231.1, NP_{—}937516.1, AAU44816.1, AAA25978.1, XP_{—}002721010.1, AAK81868.1, AAK71350.1, AAK71349.1, ZP_{—}06499968.1, ZP_{—}06498781.1, YP_{—}003472045.1, ACA03779.1, ABL84756.1, AAQ16175.1, AAT51302.1, AAT51199.1, ZP_{—}05639386.1, ACH70299.1, ACA60824.1, BAB32432.1,
in particular
AAK81868.1, NP_{—}743567.1, AAK71349.1, YP_{—}001269622.1, ADR61731.1, AAU44816.1, AAQ16175.1, YP_{—}001670627.1, ACH70299.1, Q9KJH8.1, YP_{—}004703658.1, ZP_{—}08139631.1, YP_{—}609790.1, YP_{—}001747923.1, YP_{—}258557.1, YP_{—}347066.1, YP_{—}002871082.1, YP_{—}004352505.1, ACA60824.1, ZP_{—}07774051.1, BAB32432.1, ZP_{—}05640568.1, EGH58099.1, EGH64812.1, EGH11618.1, ZP_{—}06456665.1, YP_{—}276116.1, EFW81598.1, EGH95622.1, EGH22129.1, NP_{—}794008.1, ZP_{—}03399268.1, ZP_{—}07264431.1, EGH73565.1, YP_{—}237050.1, ZP_{—}06498781.1, EGH29888.1, EGH79586.1, EGH50352.1, YP_{—}792557.1, YP_{—}001350135.1, ZP_{—}01364106.1, ZP_{—}04932415.1, NP_{—}249421.1, YP_{—}004379169.1, ACAO3779.1, YP_{—}001186851.1, YP_{—}004475334.1, ZP_{—}04589662.1, ZP_{—}03398232.1, EGH10011.1, ZP_{—}07229875.1, ZP_{—}05639386.1, EGH66549.1, YP_{—}275219.1, ZP_{—}07005523.1, EFW79804.1, ZP_{—}06458504.1, EGH85976.1, YP_{—}236199.1, EGH43364.1, ZP_{—}07261632.1, ZP_{—}06499968.1, EGH29417.1, EGH54896.1, EGH22392.1, EGH97259.1, NP_{—}793082.1, EGH90852.1, EGH41593.1, NP_{—}252169.1, ZP_{—}01366930.1, YP_{—}001347031.1, ZP_{—}07778021.1, YP_{—}002875182.1, AAA25978.1, ABL84756.1, EGH81248.1, ZP_{—}07795409.1
and particularly preferably AAU44816.1, NP_{—}743567.1, YP_{—}001269622.1, ADR61731.1, AAK71349.1, YP_{—}001670627.1, AAK81868.1, AAQ16175.1, Q9KJH8.1, ACH70299.1, YP_{—}004703658.1, ZP_{—}08139631.1, YP_{—}609790.1, YP_{—}001747923.1, AAK71350.1,
and
proteins with a polypeptide sequence wherein up to 60%, preferably up to 25%, particularly preferably up to 15%, in particular up to 10, 9, 8, 7, 6, 5, 4, 3, 2 or 1% of the amino acid residues compared to the aforementioned reference sequences are modified by deletion, insertion, substitution or a combination thereof and which still possess at least 50%, preferably 65%, particularly preferably 80%, in particular more than 90% of the activity of the protein with the corresponding, aforementioned reference sequence, wherein 100% activity of the reference protein is understood to mean the increasing of the activity of the cells used as a biocatalyst, i.e. the quantity of substance converted per unit time based on the cell quantity used (units per gram cell dry weight [U/g CDW]) in comparison to the activity of the biocatalyst in the absence of the reference protein, wherein the activity in this connection and in connection with the determination of the activity of the enzyme E_{iib} in general is understood to mean in particular the conversion of dodecanoyl-CoA thioester to dodecanoyl-ACP thioester.

### Third Genetic Modification for the Production of Carboxylate Esters

[0132] In particular for the production of ω-functionalized carboxylate esters, such as for example ω-hydroxy-, ω-carboxy- or ω-aminocarboxylate esters it is advantageous if the microorganism has a third genetic modification, which compared with the enzymatic activity of the wild type of the microorganism comprises increased activity of at least one of the enzymes E_{iib}, Eᵥ, Eᵥᵢ, or Eᵥᵢᵢ which are involved in the conversion of carboxylic acids or ω-functionalized carboxylic acids to carboxylate esters or ω-functionalized carboxylate esters.

[0133] In this connection, it is preferable according to the invention that this genetic modification is, compared to the enzymatic activity of the wild type of the microorganism, increased activity of at least one of the enzymes selected from the group

E_{iib} Acyl-CoA (coenzyme A):ACP (acyl carrier protein) transacylase, which converts an ACP thioester into a CoA thioester or a CoA thioester into an ACP thioester,
Eᵥ Wax ester synthase or alcohol O acyltransferase, preferably of EC 2.3.1.75 or EC 2.3.1.84, which catalyses the synthesis of an ester from an acyl-coenzyme A thioester or an ACP thioester and an alcohol,
Eᵥᵢ Acyl-CoA (coenzyme A) synthetase, preferably of EC 6.2.1.3, which catalyses the synthesis of an acyl-coenzyme A thioester, and
Eᵥᵢᵢ Acyl thioesterase, preferably of EC 3.1.2.2, EC 3.1.2.4, EC 3.1.2.18, EC 3.1.2.19, EC 3.1.2.20 or EC 3.1.2.22, which catalyses the conversion of an acyl thioester with an alcohol to a carboxylate ester.

[0134] In this connection, it is particularly preferable that the third genetic modification comprises combinations of the increased activities of the enzymes selected from

### Eᵥ, Eᵥᵢᵢ, EᵥEᵥᵢ, EᵥᵢEᵥᵢᵢ and EᵥᵢEᵥᵢᵢE_{iib}.

[0135] Preferred enzymes E_{iib} in connection with the third genetic modification correspond to the enzymes E_{iib} listed above as preferable in connection with the first genetic modification.

Specific enzymes Eᵥ

[0136] In cells preferred according to the invention, the enzyme Eᵥ is one which comprises sequences selected from:

NP_{—}808414.2, NP_{—}001178653.1, XP_{—}003272721.1, XP_{—}002720111.1, NP_{—}001002254.1, XP_{—}529027.1, XP_{—}002831804.1, BAC28882.1, XP_{—}549056.2, XP_{—}002918053.1, XP_{—}001085075.1, XP_{—}002763005.1, XP_{—}002700092.1, XP_{—}599558.4, EDL95940.1, XP_{—}001496780.1, CAD89267.1, EFB28125.1, YP_{—}004747160.1, YP_{—}004746900.1, YP_{—}004746665.1, YP_{—}004746558.1, YP_{—}004746531.1, YP_{—}004746530.1, YP_{—}004745948.1, YP_{—}004745222.1, YP_{—}004744358.1, YP_{—}004743710.1, YP_{—}002492297.1, AEK40846.1, YP_{—}001847685.1, YP_{—}001712672.1, YP_{—}001706290.1, YP_{—}004724737.1, YP_{—}004723134.1, AEJ51098.1, AEJ48174.1, AEJ47480.1, YP_{—}004392630.1, YP_{—}004099725.1, YP_{—}003912033.1, YP_{—}003652731.1, YP_{—}003301387.1, YP_{—}003298139.1, YP_{—}001509672.1, YP_{—}001505948.1, YP_{—}001432486.1, YP_{—}001432432.1, YP_{—}924893.1, YP_{—}923981.1, YP_{—}922869.1, YP_{—}922597.1, YP_{—}922419.1, ZP_{—}08629145.1, ZP_{—}08628906.1, YP_{—}001380027.1, YP_{—}001280731.1, YP_{—}001280730.1, YP_{—}888966.1, YP_{—}890540.1, YP_{—}888236.1, YP_{—}888223.1, YP_{—}888574.1, YP_{—}884705.1, YP_{—}889488.1, YP_{—}886248.1, YP_{—}882534.1, YP_{—}881069.1, YP_{—}881444.1, YP_{—}883472.1, YP_{—}879642.1, YP_{—}884073.1, YP_{—}880917.1, YP_{—}882201.1, YP_{—}879422.1, YP_{—}707862.1, YP_{—}707847.1, YP_{—}707633.1, YP_{—}707572.1, YP_{—}707571.1, YP_{—}706785.1, YP_{—}706267.1, YP_{—}705586.1, YP_{—}705294.1, YP_{—}702929.1, YP_{—}701572.1, YP_{—}700576.1, YP_{—}700081.1, YP_{—}700033.1, YP_{—}700018.1, YP_{—}700017.1, YP_{—}699999.1, CCB78299.1, CCB78283.1, CCB72233.1, YP_{—}004663601.1, YP_{—}004525283.1, YP_{—}004524901.1, YP_{—}004524237.1, YP_{—}004524223.1, YP_{—}004523752.1, YP_{—}004522677.1, YP_{—}004521797.1, YP_{—}004521441.1, YP_{—}004020500.1, YP_{—}004014348.1, EGO40684.1, EGO38684.1, EGO38655.1, EGO37244.1, EGO36970.1, EGO36701.1, YP_{—}003951335.1, YP_{—}003812176.1, YP_{—}003811992.1, YP_{—}003810691.1, YP_{—}003810418.1, YP_{—}003809501.1, ZP_{—}08574204.1, CCA19760.1, XP_{—}002900672.1, ZP_{—}06414567.1, ZP_{—}06413635.1, ZP_{—}06411773.1, ZP_{—}06411772.1, ZP_{—}06271823.1, ZP_{—}05620754.1, ZP_{—}05360001.1, ZP_{—}04752019.1, ZP_{—}04751943.1, ZP_{—}04750965.1, ZP_{—}04750465.1, ZP_{—}04750453.1, ZP_{—}04750228.1, ZP_{—}04750091.1, ZP_{—}04749363.1, ZP_{—}04749348.1, ZP_{—}04749293.1, ZP_{—}04749287.1, ZP_{—}04749022.1, ZP_{—}04748677.1, ZP_{—}04747379.1, ZP_{—}04747377.1, ZP_{—}04747348.1, ZP_{—}04747282.1, ZP_{—}04747159.1, ZP_{—}04747093.1, ZP_{—}04746958.1, ZP_{—}04717323.1, ZP_{—}04684258.1, ZP_{—}04386203.1, ZP_{—}04385082.1, ZP_{—}04384030.1, ZP_{—}04384029.1, ZP_{—}03534755.1, ZP_{—}01115502.1, ZP_{—}01102322.1, YP_{—}004583872.1, YP_{—}004583323.1, YP_{—}004573656.1, YP_{—}004571392.1, YP_{—}003513699.1, ZP_{—}08553011.1, ZP_{—}08552672.1, YP_{—}003467054.1, YP_{—}003572597.1, YP_{—}579515.1, YP_{—}001136465.1, YP_{—}001136231.1, YP_{—}001135959.1, YP_{—}001135349.1, YP_{—}001133828.1, YP_{—}001133806.1, YP_{—}001133693.1, YP_{—}001133270.1, YP_{—}001132329.1, YP_{—}001131721.1, YP_{—}001131631.1, YP_{—}001073715.1, YP_{—}001073143.1, YP_{—}001072388.1, YP_{—}001072036.1, YP_{—}001071893.1, YP_{—}001071814.1, YP_{—}001071689.1, YP_{—}001070856.1, YP_{—}001069682.1, YP_{—}001069164.1, YP_{—}001068496.1, YP_{—}939377.1, YP_{—}642242.1, YP_{—}641664.1, YP_{—}641419.1, YP_{—}640919.1, YP_{—}640783.1, YP_{—}640704.1, YP_{—}640572.1, YP_{—}640571.1, YP_{—}640494.1, YP_{—}639709.1, YP_{—}639198.1, YP_{—}638523.1, YP_{—}638030.1, YP_{—}637968.1, YP_{—}637380.1, YP_{—}446603.1, NP_{—}001185377.1, NP_{—}200151.2, NP_{—}568547.1, NP_{—}197641.1, NP_{—}200150.1, NP_{—}197139.1, NP_{—}190490.1, NP_{—}190488.1, NP_{—}177356.1, YP_{—}004495408.1, YP_{—}004495023.1, YP_{—}004494197.1, YP_{—}004494168.1, YP_{—}004493973.1, YP_{—}004493936.1, YP_{—}004493628.1, YP_{—}004493589.1, YP_{—}004493509.1, YP_{—}004493477.1, YP_{—}004493462.1, YP_{—}004492352.1, YP_{—}004492155.1, YP_{—}004492039.1, YP_{—}004491716.1, YP_{—}004491715.1, YP_{—}004491501.1, YP_{—}003375642.1, YP_{—}003411203.1, YP_{—}003410436.1, YP_{—}003395271.1, YP_{—}003395089.1, YP_{—}003393635.1, YP_{—}003384208.1, YP_{—}003379551.1, ZP_{—}04388235.1, YP_{—}002134168.1, ZP_{—}01900421.1, ZP_{—}01900085.1, ZP_{—}01899829.1, ZP_{—}01898741.1, BAK05274.1, BAJ93623.1, BAJ97841.1, BAK08349.1, BAJ93204.1, BAJ92722.1, BAK06983.1, BAJ86545.1, BAK02325.1, BAJ85619.1, BAJ84892.1, ZP_{—}05218281.1, ZP_{—}05218149.1, ZP_{—}05217310.1, ZP_{—}05216978.1, ZP_{—}05216447.1, ZP_{—}05216446.1, ZP_{—}05216025.1, ZP_{—}05214687.1, ZP_{—}08476543.1, ZP_{—}04749239.1, YP_{—}823060.1, ADP99639.1, ADP98951.1, ADP98855.1, ADP98710.1, ADP96265.1, ZP_{—}08461736.1, ZP_{—}08461735.1, ZP_{—}07608690.1, YP_{—}045555.1 (encoded by SEQ ID No. 22), YP_{—}872243.1, YP_{—}004009106.1, YP_{—}004008736.1, YP_{—}004008003.1, YP_{—}004007600.1, YP_{—}004006799.1, YP_{—}004006436.1, YP_{—}004006072.1, YP_{—}004005008.1, YP_{—}003486913.1, NP_{—}301898.1, ZP_{—}08434757.1, YP_{—}004079491.1, YP_{—}004078785.1, YP_{—}004077880.1, YP_{—}004076486.1, YP_{—}004076464.1, YP_{—}004076350.1, YP_{—}004075391.1, YP_{—}004074864.1, ZP_{—}01103855.1, YP_{—}465274.1, ZP_{—}08403393.1, ZP_{—}08402717.1, ZP_{—}08402716.1, YP_{—}004427559.1, YP_{—}001277083.1, YP_{—}001276783.1, YP_{—}524767.1, YP_{—}522739.1, YP_{—}521788.1, YP_{—}004335162.1, YP_{—}004333708.1, YP_{—}004332973.1, YP_{—}004332349.1, YP_{—}004157731.1, YP_{—}004224204.1, YP_{—}003275673.1, YP_{—}003275371.1, YP_{—}003274979.1, YP_{—}003274924.1, YP_{—}003274705.1, YP_{—}956544.1, YP_{—}955502.1, YP_{—}955007.1, YP_{—}954887.1, YP_{—}954886.1, YP_{—}954859.1, YP_{—}954399.1, YP_{—}953715.1, YP_{—}953073.1, YP_{—}952592.1, YP_{—}951909.1, YP_{—}951298.1, YP_{—}951083.1, ZP_{—}08287899.1, ZP_{—}08272356.1, ZP_{—}08270967.1, CCA60099.1, CCA56737.1, YP_{—}983728.1, YP_{—}550833.1, YP_{—}549124.1, YP_{—}121795.1, YP_{—}120815.1, YP_{—}118589.1, YP_{—}117783.1, YP_{—}117375.1, YP_{—}003646883.1, YP_{—}003646055.1, YP_{—}003645661.1, EGE49469.1, ZP_{—}08234310.1, CBZ53121.1, YP_{—}004010866.1, EGE24961.1, EGE18726.1, EGE15701.1, EGE12950.1, EGE10026.1, EGB03968.1, ZP_{—}08206563.1, ZP_{—}08205089.1, ZP_{—}08204958.1, ZP_{—}08204416.1, ZP_{—}08203326.1, YP_{—}714381.1, YP_{—}713817.1, YP_{—}694462.1, YP_{—}693524.1, YP_{—}003341775.1, YP_{—}003339587.1, ZP_{—}08197177.1, ADW01905.1, YP_{—}004242683.1, ZP_{—}07484742.2, ZP_{—}07441979.2, ZP_{—}07441978.2, ZP_{—}07437333.2, ZP_{—}06960424.1, ZP_{—}06801236.1, ZP_{—}06799517.1, ZP_{—}05769718.1, ZP_{—}05768326.1, ZP_{—}05767970.1, ZP_{—}05766272.1, ZP_{—}05763839.1, YP_{—}003204265.1, YP_{—}003203570.1, YP_{—}003200768.1, YP_{—}003134884.1, YP_{—}003134608.1, ZP_{—}05140320.1, NP_{—}001140997.1, EEE64643.1, EEE55448.1, EEE32548.1, ZP_{—}03534756.1, ZP_{—}03533653.1, ZP_{—}03531929.1, EEC71274.1, EAY98969.1, EAY75974.1, EAY75973.1, ADZ24988.1, ZP_{—}08157247.1, ZP_{—}08156660.1, ZP_{—}08156249.1, ZP_{—}08153292.1, ZP_{—}08152876.1, ZP_{—}08152662.1, YP_{—}002946672.1, YP_{—}960669.1, YP_{—}960629.1, YP_{—}960328.1, YP_{—}958134.1, YP_{—}957462.1, YP_{—}001022272.1, ZP_{—}08123690.1, ZP_{—}08120547.1, ZP_{—}08119498.1, EGB29195.1, EGB27143.1, YP_{—}003770089.1, YP_{—}003769971.1, YP_{—}003764703.1, YP_{—}003764513.1, YP_{—}003103950.1, YP_{—}003168536.1, YP_{—}003168331.1, YP_{—}003166844.1, CAJ88696.1, NP_{—}769520.1, YP_{—}001141853.1, YP_{—}001108534.1, YP_{—}001106516.1, YP_{—}907824.1, YP_{—}907344.1, YP_{—}906945.1, YP_{—}906856.1, YP_{—}906855.1, YP_{—}906831.1, YP_{—}906494.1, YP_{—}906243.1, YP_{—}905962.1, YP_{—}905765.1, YP_{—}905343.1, YP_{—}905239.1, YP_{—}325796.1, YP_{—}130413.1, NP_{—}625255.1, NP_{—}624462.1, NP_{—}338129.1, NP_{—}338004.1, NP_{—}337859.1, NP_{—}337740.1, NP_{—}337694.1, NP_{—}336266.1, NP_{—}335919.1, NP_{—}335351.1, NP_{—}334638.1, NP_{—}218257.1, NP_{—}218251.1, NP_{—}217997.1, NP_{—}217888.1, NP_{—}217751.1, NP_{—}217750.1, NP_{—}217646.1, NP_{—}217604.1, NP_{—}217603.1, NP_{—}217000.1, NP_{—}216801.1, NP_{—}216276.1, NP_{—}215941.1, NP_{—}215410.1, NP_{—}214735.1, ZP_{—}04661667.1, EFW44815.1, EFW44455.1, ZP_{—}08024634.1, ZP_{—}08024620.1, ZP_{—}08023777.1, ZP_{—}08023597.1, YP_{—}002784032.1, YP_{—}002783585.1, YP_{—}002782904.1, YP_{—}002782647.1, YP_{—}002780099.1, YP_{—}002779887.1, YP_{—}002778497.1, YP_{—}002777657.1, YP_{—}002777402.1, ZP_{—}07966321.1, ZP_{—}07944768.1, CBI21867.3, CBI40547.3, CBI40544.3, CBI40540.3, CBI40536.3, CBI40534.3, CBI40533.3, CBI32385.3, ZP_{—}05765756.1, ZP_{—}05765643.1, ZP_{—}05765597.1, ZP_{—}05765596.1, YP_{—}001705267.1, YP_{—}001704692.1, YP_{—}001704281.1, YP_{—}001702654.1, YP_{—}001701260.1, ZP_{—}05770434.1, ZP_{—}05766274.1, ZP_{—}05762133.1, ZP_{—}05762130.1, ZP_{—}01101223.1, YP_{—}481580.1, YP_{—}979623.1, YP_{—}979196.1, ZP_{—}07414300.2, ZP_{—}03537340.1, ZP_{—}03537339.1, ZP_{—}03536772.1, ZP_{—}03536404.1, ZP_{—}03433478.1, ZP_{—}03430367.1, ZP_{—}03430260.1, ZP_{—}03429345.1, ZP_{—}03428583.1, ZP_{—}03426905.1, ZP_{—}03426458.1, ZP_{—}03426456.1, ZP_{—}03426455.1, ZP_{—}03425014.1, ZP_{—}03424082.1, ZP_{—}03421649.1, ZP_{—}03419291.1, ZP_{—}03418394.1, ZP_{—}03417976.1, ZP_{—}03414875.1, ZP_{—}06952098.1, ZP_{—}05528769.1, ZP_{—}05527907.1, ZP_{—}05227984.1, ZP_{—}05227897.1, ZP_{—}05227653.1, ZP_{—}05227585.1, ZP_{—}05227420.1, ZP_{—}05227202.1, ZP_{—}05226387.1, ZP_{—}05226386.1, ZP_{—}05225355.1, ZP_{—}05225200.1, ZP_{—}05223431.1, ZP_{—}05223402.1, ZP_{—}04697793.1, ZP_{—}02550609.1, ZP_{—}02548969.1, EEE25493.1, ABO13188.2, ZP_{—}07205208.1, YP_{—}589436.1, BAJ33896.1, ZP_{—}07718107.1, ZP_{—}07717513.1, ZP_{—}07717390.1, ZP_{—}07716424.1, ZP_{—}04384387.1, ZP_{—}07376578.1, ZP_{—}06871097.1, ZP_{—}06852444.1, ZP_{—}06852442.1, ZP_{—}06852283.1, ZP_{—}06852150.1, ZP_{—}06852032.1, ZP_{—}06850980.1, ZP_{—}06850766.1, ZP_{—}06850644.1, ZP_{—}06849846.1, ZP_{—}06849446.1, ZP_{—}06849265.1, ZP_{—}06848894.1, ZP_{—}06848550.1, ZP_{—}06847321.1, ZP_{—}06847245.1, ZP_{—}06728640.1, ZP_{—}06155537.1, ZP_{—}03822106.1, ZP_{—}03822105.1, ZP_{—}03264909.1, ZP_{—}01915979.1, ZP_{—}01914209.1, ZP_{—}01909198.1, ZP_{—}01895985.1, ZP_{—}01893763.1, ZP_{—}01893601.1, ZP_{—}01893547.1, ZP_{—}01864269.1, ZP_{—}01736818.1, ZP_{—}01693481.1, ZP_{—}01626518.1, ZP_{—}01616172.1, ZP_{—}01461648.1, ZP_{—}01439861.1, ZP_{—}01311414.1, ZP_{—}01222733.1, ZP_{—}01038993.1, ZP_{—}00997001.1, ZP_{—}06533596.1, ZP_{—}07308012.1, ZP_{—}07282351.1, ZP_{—}07282257.1, ZP_{—}07278697.1, ZP_{—}07277986.1, ZP_{—}07277799.1, ZP_{—}07011797.1, ZP_{—}06913634.1, ZP_{—}06711075.1, ZP_{—}06575037.1, ZP_{—}06523715.1, ZP_{—}06522644.1, ZP_{—}06520408.1, ZP_{—}06518751.1, ZP_{—}06514733.1, ZP_{—}06511304.1, ZP_{—}06510466.1, ZP_{—}06509700.1, ZP_{—}06504004.1, ZP_{—}06452618.1, ZP_{—}06451687.1, ZP_{—}06450049.1, ZP_{—}06444722.1, ZP_{—}06443996.1, ZP_{—}06443677.1, ZP_{—}06438510.1, ZP_{—}06435077.1, ZP_{—}06434554.1, ZP_{—}06432969.1, ZP_{—}06431341.1, ZP_{—}06430915.1, ZP_{—}05129423.1, ZP_{—}05127637.1, ZP_{—}05126217.1, ZP_{—}05096686.1, ZP_{—}05095013.1, ZP_{—}05094400.1, ZP_{—}05093434.1, ZP_{—}05043539.1, ZP_{—}05041631.1, ZP_{—}04959394.1, ZP_{—}04956551.1, ZP_{—}01052702.1, YP_{—}437020.1, YP_{—}436128.1, YP_{—}432512.1, YP_{—}432391.1, ZP_{—}06072118.1, ZP_{—}06069021.1, ZP_{—}06065092.1, ZP_{—}06062254.1, YP_{—}003032200.1, YP_{—}003030813.1, YP_{—}002766854.1, YP_{—}002766842.1, YP_{—}002766292.1, YP_{—}002765623.1, YP_{—}002765076.1, YP_{—}002764977.1, YP_{—}002764976.1, YP_{—}002764693.1, YP_{—}002764633.1, YP_{—}002646305.1, YP_{—}002646304.1, YP_{—}001853537.1, YP_{—}001853530.1, YP_{—}001853214.1, YP_{—}001852100.1, YP_{—}001851711.1, YP_{—}001851686.1, YP_{—}001851684.1, YP_{—}001851611.1, YP_{—}001851610.1, YP_{—}001851579.1, YP_{—}001850950.1, YP_{—}001850935.1, YP_{—}001850900.1, YP_{—}001850899.1, YP_{—}001850378.1, YP_{—}001849911.1, YP_{—}001849825.1, YP_{—}001849624.1, YP_{—}001849470.1, YP_{—}001848848.1, YP_{—}001848784.1, YP_{—}001822237.1, YP_{—}001289190.1, YP_{—}001289078.1, YP_{—}001288434.1, YP_{—}001287727.1, YP_{—}001286168.1, YP_{—}001085790.1, YP_{—}856793.1, YP_{—}629387.1, YP_{—}615587.1, YP_{—}615252.1, YP_{—}457389.1, YP_{—}263530.1, NP_{—}962591.1, NP_{—}962411.1, NP_{—}962281.1, NP_{—}961234.1, NP_{—}960903.1, NP_{—}960387.1, NP_{—}960090.1, NP_{—}959281.1, NP_{—}959065.1, NP_{—}857403.1, NP_{—}857149.1, NP_{—}857148.1, NP_{—}857047.1, NP_{—}856907.1, NP_{—}856759.1, NP_{—}856156.1, NP_{—}855443.1, NP_{—}855112.1, NP_{—}853892.1, NP_{—}828432.1, NP_{—}603766.1, XP_{—}003081224.1, YP_{—}003778608.1, YP_{—}003730939.1, XP_{—}003059244.1, ADI13131.1, XP_{—}002992800.1, XP_{—}002963877.1, XP_{—}001419779.1, XP_{—}002988280.1, XP_{—}002987493.1, CBH32551.1, CBH32550.1, CBH19575.1, CBH19574.1, YP_{—}003627553.1, XP_{—}002879777.1, XP_{—}002877657.1, XP_{—}002877655.1, XP_{—}002873570.1, XP_{—}002871716.1, XP_{—}002870738.1, XP_{—}002868506.1, XP_{—}002865972.1, XP_{—}002864239.1, XP_{—}002862308.1, ZP_{—}05823139.1, NP_{—}001043877.1, ZP_{—}06693274.1, ZP_{—}06058985.1, NP_{—}001044374.1, XP_{—}002835451.1, XP_{—}002787542.1, XP_{—}002785958.1, XP_{—}002785645.1, XP_{—}002783220.1, XP_{—}002774061.1, XP_{—}002767852.1, XP_{—}002766051.1, XP_{—}002765456.1, XP_{—}002765455.1, XP_{—}002677788.1, XP_{—}002671612.1, XP_{—}002736281.1, CBA31373.1, XP_{—}002184474.1, XP_{—}002325936.1, XP_{—}002323705.1, XP_{—}002325937.1, XP_{—}002323911.1, XP_{—}002323706.1, XP_{—}002328965.1, XP_{—}002318416.1, XP_{—}002310400.1, ACY38597.1, ACY38596.1, ACY38595.1, ACY38594.1, ACY38593.1, ACY38592.1, ACY38591.1, ACY38590.1, ACX81315.1, ACX81314.1, XP_{—}001868729.1, XP_{—}001847517.1, XP_{—}001847515.1, XP_{—}002502575.1, ACU20370.1, ACU18073.1, XP_{—}002523348.1, XP_{—}002516707.1, XP_{—}002429016.1, BAH89673.1, XP_{—}002440221.1, XP_{—}002459294.1, XP_{—}002458560.1, XP_{—}320167.4, XP_{—}001780431.1, XP_{—}002364905.1, XP_{—}002263196.1, XP_{—}002263137.1, XP_{—}002263409.1, XP_{—}002263252.1, XP_{—}002268615.1, XP_{—}002278404.1, XP_{—}002274522.1, XP_{—}002282418.1, XP_{—}001633379.1, XP_{—}001632267.1, XP_{—}001632004.1, XP_{—}001622638.1, XP_{—}002155609.1, XP_{—}759225.1, XP_{—}002152406.1, XP_{—}001914129.1, XP_{—}001738032.1, XP_{—}001731626.1, XP_{—}001209859.1, CAN79451.1, CAN78449.1, CAN72806.1, CAN71951.1, CAN71950.1, CAN76656.1, CAN62907.1, AAZ08051.1, ABO21022.1, ABO21021.1, ABO21020.1, ABJ96321.1, BAF01088.1, XP_{—}758106.1, BAC42871.1, BAB09801.1, BAB09102.1, in particular YP_{—}045555.1 (encoded by SEQ ID No. 22) and NP_{—}808414.2
and
proteins with a polypeptide sequence wherein up to 60%, preferably up to 25%, particularly preferably up to 15%, in particular up to 10, 9, 8, 7, 6, 5, 4, 3, 2 or 1% of the amino acid residues compared to the aforementioned reference sequences are modified by deletion, insertion, substitution or a combination thereof and which still possess at least 50%, preferably 65%, particularly preferably 80%, in particular more than 90% of the activity of the protein with the corresponding, aforementioned reference sequence, wherein 100% activity of the reference protein is understood to mean the increasing of the activity of the cells used as a biocatalyst, i.e. the quantity of substance converted per unit time based on the cell quantity used (units per gram cell dry weight [U/g CDW]) in comparison to the activity of the biocatalyst in the absence of the reference protein, wherein the activity in this connection and in connection with the determination of the activity of the enzyme Eᵥ in general is understood to mean in particular the conversion of dodecanoyl-CoA thioester and/or dodecanoyl-ACP thioester with methanol to dodecanoyl methyl esters.

[0137] If the enzyme Eᵥ is an alcohol O-acyltransferase of EC 2.3.1.84, then it is preferable that this is selected from:

EGA72844.1, NP_{—}015022.1, S69991, AAP72991.1, EDN63695.1, BAA05552.1, AAP72992.1, S69992, AAP72995.1, XP_{—}002552712.1, XP_{—}001646876.1, XP_{—}002551954.1, EGA82692.1, EDN61766.1, EGA86689.1, EGA74966.1, AAU09735.1, NP_{—}011693.1, XP_{—}445666.1, BAA13067.1, AAP72993.1, EGA62172.1, XP_{—}455762.1, EGA58658.1,
and
proteins with a polypeptide sequence wherein up to 60%, preferably up to 25%, particularly preferably up to 15%, in particular up to 10, 9, 8, 7, 6, 5, 4, 3, 2 or 1% of the amino acid residues compared to the aforementioned reference sequences are modified by deletion, insertion, substitution or a combination thereof and which still possess at least 50%, preferably 65%, particularly preferably 80%, in particular more than 90% of the activity of the protein with the corresponding, aforementioned reference sequence, wherein 100% activity of the reference protein is understood to mean the increasing of the activity of the cells used as a biocatalyst, i.e. the quantity of substance converted per unit time based on the cell quantity used (units per gram cell dry weight [U/g CDW]) in comparison to the activity of the biocatalyst in the absence of the reference protein, wherein the activity in this connection and in connection with the determination of the activity of the enzyme Eᵥ in general is understood to mean in particular the conversion of dodecanoyl-CoA thioester with methanol to dodecanoyl methyl ester.

[0138] Microorganisms preferred according to the invention are those which are obtained when the microorganisms listed below having a third genetic modification in the sense of the invention are used as the starting point, in that they are provided with a first and second genetic modification and optionally at least one further genetic modification in the sense of the invention.

[0139] WO2007136762 A2 describes, particularly on pages 2 to 4 and 21 to 24, FIGS. 2 to 4, practical examples 1, 2 and 5 to 7 and claims 1, 2, 5, 6, 9 to 27 and 33, microorganisms preferably used according to the invention which have a third genetic modification, so that compared to their wild type they are capable of forming more fatty acids and fatty acid derivatives, in particular fatty acid esters, wax esters, hydrocarbons and fatty alcohols, from at least one simple carbon source. The document also describes enzymes Eᵢ preferred according to the invention and the sequences thereof, particularly on pages 21 to 24, in table 10 and FIG. 10.

Specific enzymes Eᵥᵢ

[0140] In cells preferred according to the invention, the enzyme Eᵥᵢ is one which comprises sequences selected from YP_{—}001724804.1 (encoded by SEQ ID No. 21)

and
proteins with a polypeptide sequence wherein up to 60%, preferably up to 25%, particularly preferably up to 15%, in particular up to 10, 9, 8, 7, 6, 5, 4, 3, 2 or 1% of the amino acid residues compared to the aforementioned reference sequence are modified by deletion, insertion, substitution or a combination thereof and which still possess at least 50%, preferably 65%, particularly preferably 80%, in particular more than 90% of the activity of the protein with the corresponding, aforementioned reference sequence, wherein 100% activity of the reference protein is understood to mean the increasing of the activity of the cells used as a biocatalyst, i.e. the quantity of substance converted per unit time based on the cell quantity used (units per gram cell dry weight [U/g CDW]) in comparison to the activity of the biocatalyst in the absence of the reference protein, wherein the activity in this connection and in connection with the determination of the activity of the enzyme Eᵥᵢ in general is understood to mean in particular the synthesis of dodecanoyl-CoA thioester.

### Specific Enzymes Eᵥᵢᵢ

[0141] Microorganisms preferred according to the invention are those which are obtained when the microorganisms listed below having a third genetic modification in the sense of the invention are used as the starting point, in that they are provided with a first and second genetic modification and optionally at least one further genetic modification in the sense of the invention.

[0142] WO2010075483 A2 describes, particularly in paragraphs [0061] to [0090] and [0287] to [0367], FIGS. 1, 4 and 5, practical examples 1 to 38 and claims 18 to 26, microorganisms preferably used according to the invention which have a third genetic modification, so that compared to their wild type they are capable of forming more fatty acids and fatty acid derivatives, in particular fatty acids, fatty acid methyl esters, fatty acid ethyl esters, fatty alcohols, fatty alkyl acetates, fatty aldehydes, fatty amines, fatty amides, fatty sulphates, fatty ethers, ketones, alkanes, internal and terminal olefins, dicarboxylic acids, α,ω-dicarboxylic acids and α,ω-diols, from at least one simple carbon source. The document also describes enzymes Eᵢ preferred according to the invention and the sequences thereof, particularly in paragraphs [0012] to [0060], tables 7, 17, 26 and 27, FIGS. 1, 44 to 47 and 55 to 59, practical examples 1 to 38 and claims 1 to 17.

### Fourth Genetic Modification for the Production of ω-Hydroxy- or ω-Oxo-Functionalized Carboxylic Acids and Esters

[0143] For the case where the production of ω-hydroxy- or ω-oxo-functionalized carboxylic acids and esters—also as precursor stages for further ω-functionalizations such as for example ω-amination—is desired, it can be advantageous suitably to reduce the corresponding carboxylic acids or esters which have been oxidized in the ω position up to the carboxy function in the microorganism.

[0144] For this, microorganisms preferred according to the invention have a fourth genetic modification which, compared with the enzymatic activity of the wild type of the microorganism, comprises increased activity of at least one of the enzymes selected from the group

E_{iib} Acyl-CoA (coenzyme A):ACP (acyl carrier protein) transacylase, which converts an ACP thioester into a CoA thioester or a CoA thioester into an ACP thioester,
Eᵥᵢ Acyl-CoA (coenzyme A) synthetase, preferably of EC 6.2.1.3, which preferentially catalyses the synthesis of an acyl-coenzyme A thioester,
Eᵥᵢᵢ Acyl-CoA (coenzyme A) reductase, preferably of EC 1.2.1.42 or EC 1.2.1.50, which preferentially catalyses the reduction of an acyl-coenzyme A thioester to the corresponding alkan-1-al or alkan-1-ol
Eᵢₓ Fatty acid reductase (also fatty aldehyde dehydrogenase or arylaldehyde oxidoreductase), preferably of EC 1.2.1.3, EC 1.2.1.20 or EC 1.2.1.48, which preferentially catalyses the reduction of an alkanoic acid to the corresponding alkan-1-al, and
Eₓ Acyl-ACP (acyl carrier protein) reductase, preferably of EC 1.2.1.80, which preferentially catalyses the reduction of an acyl-ACP thioester to the corresponding alkan-1-al or alkan-1-ol.

[0145] In this connection, it is particularly preferable that the fourth genetic modification comprises combinations of increased activities of the enzymes selected from Eᵥᵢᵢᵢ, Eᵢₓ, Eₓ, EᵥᵢEᵥᵢᵢᵢ and EᵥᵢEₓE_{iib}.

[0146] Preferred enzymes E_{iib} in connection with the fourth genetic modification correspond to the enzymes E_{iib} listed above as preferable in connection with the first and third genetic modification.

[0147] Thus configured organisms preferred according to the invention are also outstandingly suitable for the production of compounds which are selected from α,ω-alkanediols, α,ω-alkanedialdehydes, α-oxo-ω-hydroxyalkanes and α,ω-alkanediamines, α,ω-alkenediols, α,ω-alkenedialdehydes, α-oxo-ω-hydroxyalkenes and α,ω-alkenediamines, since compounds of these classes are produced in significant quantities as well as the ω-functionalized carboxylic acids and ω-functionalized carboxylate esters.

[0148] In this connection, it may be mentioned that the alkene derivatives in particular arise through the conversion of unsaturated fatty acids formed by the microorganism, such as for example palmitoleic acid, oleic acid, linolic acid, adinolenic acid and γ-linolenic acid.

### Specific Enzymes Eᵥᵢᵢᵢ

[0149] Microorganisms preferred according to the invention are those which are obtained when the microorganisms listed below having a fourth genetic modification in the sense of the invention are used as the starting point, in that they are provided with a first and second genetic modification and optionally at least one further genetic modification in the sense of the invention.

[0150] WO2011008565 A1 describes, particularly in paragraphs [0021], [0103] to [0106], [0108] and [0129], microorganisms preferably used according to the invention which have a fourth genetic modification, so that compared to their wild type they are capable of forming more fatty acids and fatty acid derivatives, in particular fatty acids, fatty aldehydes, fatty alcohols, alkanes and fatty acid esters from at least one simple carbon source. The document also describes enzymes Eᵥᵢᵢᵢ preferred according to the invention and the sequences thereof, particularly in paragraphs [0104] to [0106] and [0108] and [0129] and practical example 11.

[0151] WO2008151149 A2 describes, particularly in paragraphs [0009], [0015] to [0037], [0053], [0071], [0171], [0174] to [0191], [0274] and [0396], claims 53 to 114, 188 to 206 and 344 to 355 and tables 1 to 3, microorganisms preferably used according to the invention which have a fourth genetic modification, so that compared to their wild type they are capable of forming more microbial oil from at least one simple carbon source. The document also describes enzymes Eᵥᵢᵢᵢ preferred according to the invention and the sequences thereof, particularly in paragraphs [0255] to [0261] and [0269] and tables 6 and 7.

[0152] WO2007136762 A2 describes, particularly on pages 2 to 4 and 19 to 20, FIGS. 2 to 4, practical examples 2 to 7 and claims 4, 8 to 27 and 33, microorganisms preferably used according to the invention which have a fourth genetic modification, so that compared to their wild type they are capable of forming more fatty acids and fatty acid derivatives, in particular fatty acid esters, wax esters, hydrocarbons and fatty alcohols, from at least one simple carbon source. The document also describes enzymes Eᵥᵢᵢᵢ preferred according to the invention and the sequences thereof, particularly on pages 19 to 20, in table 10 and FIG. 10.

[0153] WO2011019858 A1 describes, particularly in paragraphs [0015] to [0020], [0064] to [0074], [0085] to [0086] and [0092] to [0099], practical examples 1 to 13, FIG. 1 and claims 1 to 14, microorganisms preferably used according to the invention which have a fourth genetic modification, so that compared to their wild type they are capable of forming more fatty acids and fatty acid derivatives, in particular fatty alcohols, from at least one simple carbon source. The document also describes enzymes Eᵥᵢᵢᵢ preferred according to the invention and the sequences thereof, particularly in paragraphs [0004] to [0007] and [0075] to [0080] and practical examples 1 to 13.

[0154] WO2009140695 A1 describes, particularly in paragraphs [0031] to [0040], [0051] and [0214] to [0233], practical examples 22 to 24, table 1, FIG. 40, practical examples 5 to 24 and 28 to 30 and claims 29 to 30, microorganisms preferably used according to the invention which have a fourth genetic modification, so that compared to their wild type they are capable of forming more fatty acids and fatty acid derivatives, in particular hydrocarbons, from at least one simple carbon source. The document also describes enzymes Eᵥᵢᵢᵢ preferred according to the invention and the sequences thereof, particularly in paragraphs [0023] to [0030], [0056], [0066] to [0069] and [0193] to [0208], table 1, FIG. 39, practical examples 5 to 24 and 28 to 30 and claims 69 to 74.

[0155] WO2011008535 A1 describes, particularly in paragraphs [0023] to [0024], and [0133] to [0158], FIG. 13, claims 39 and 45 to 47 and practical examples 1 to 5, microorganisms preferably used according to the invention which have a fourth genetic modification, so that compared to their wild type they are capable of forming more fatty acids and fatty acid derivatives, in particular carboxylic acids, hydroxycarboxylic acids and lactones thereof from at least one simple carbon source. The document also describes enzymes Eᵥᵢᵢᵢ preferred according to the invention and the sequences thereof, particularly in paragraphs [0017] to [0022], [0084] to [0132], FIGS. 2 to 12, claims 31 to 37 and 40 to 44 and practical examples 1 to 5.

WO2010063031 A2 describes, particularly in paragraphs [0007], [0092] to [0100], [0181] to [0183] and [0199] to [0213], microorganisms preferably used according to the invention which have a fourth genetic modification, so that compared to their wild type they are capable of forming more microbial oil from at least one simple carbon source. The document also describes enzymes Eᵥᵢᵢᵢ preferred according to the invention and the sequences thereof, particularly in paragraphs [0191] to [0194] and tables 4 and 5.

[0156] WO2010063032 A2 describes, particularly in paragraphs [0007], [0092] to [0100], [0181] to [0183] and [0199] to [0213], microorganisms preferably used according to the invention which have a fourth genetic modification, so that compared to their wild type they are capable of forming more microbial oil from at least one simple carbon source. The document also describes enzymes Eᵥᵢᵢᵢ preferred according to the invention and the sequences thereof, particularly in paragraphs [0191] to [0194] and tables 4 and 5.

### Specific Enzymes Eᵢₓ

[0157] Microorganisms preferred according to the invention are those which are obtained when the microorganisms listed below having a fourth genetic modification in the sense of the invention are used as the starting point, in that they are provided with a first and second genetic modification and optionally at least one further genetic modification in the sense of the invention.

[0158] WO2011019858 A1 describes, particularly in paragraphs [0004] to [0008], [0064] to [0074], [0085] to [0086], [0095] to [0099], practical examples 1 to 13, FIG. 1 and claim 7, microorganisms preferably used according to the invention which have a fourth genetic modification, so that compared to their wild type they are capable of forming more fatty acids and fatty acid derivatives, in particular fatty alcohols, from at least one simple carbon source. The document also describes enzymes Eᵢₓ preferred according to the invention and the sequences thereof, particularly in paragraphs [0008] to [0009], [0074] and [0081] to [0082] and practical examples 1 to 13.

[0159] WO2010135624 A2 describes, particularly in paragraphs [0005], [0067] to [0085] and [0092] to [0102], claims 13 to 17 and practical examples 1 to 4, microorganisms preferably used according to the invention which have a fourth genetic modification, so that compared to their wild type they are capable of forming more fatty acids and fatty acid derivatives, in particular carboxylic acids, hydroxycarboxylic acids and lactones thereof, from at least one simple carbon source. The document also describes enzymes E₁ preferred according to the invention and the sequences thereof, particularly in paragraphs [0005] to [0006] and [0086] to [0090], FIGS. 3 to 7, claim 28 and practical examples 1 to 4.

[0160] WO2010062480 A2 describes, particularly in paragraphs [0022] to [0174] and [0292] to [0316], practical examples 1 and 3 to 8, FIG. 9 and claims 17 and 24, microorganisms preferably used according to the invention which have a fourth genetic modification, so that compared to their wild type they are capable of forming more fatty acids and fatty acid derivatives, in particular fatty alcohols, from at least one simple carbon source. The document also describes enzymes Eᵢₓ preferred according to the invention and the sequences thereof, particularly in paragraphs [0019] to [0032] and [0263] to [0286], table 1, FIGS. 6 to 8 and practical examples 1 and 3 to 8.

[0161] WO201042664 A2 describes, particularly in paragraphs [0236] to [0261], practical example 2, FIGS. 1 and 5 and claim 25, microorganisms preferably used according to the invention which have a fourth genetic modification, so that compared to their wild type they are capable of forming more fatty acids and fatty acid derivatives, in particular fatty alcohols, from at least one simple carbon source. The document also describes enzymes Eᵢₓ preferred according to the invention and the sequences thereof, particularly in paragraphs [0211] to [0233], FIGS. 2 to 4 and practical examples 1 to 2.

### Specific Enzymes Eₓ

[0162] Microorganisms preferred according to the invention are those which are obtained when the microorganisms listed below having a fourth genetic modification in the sense of the invention are used as the starting point, in that they are provided with a first and second genetic modification and optionally at least one further genetic modification in the sense of the invention.

[0163] WO2007136762 A2 describes, particularly on pages 2 to 4 and 19 to 20, FIGS. 2 to 4, practical examples 2 to 7 and claims 4, 8 to 27 and 33, microorganisms preferably used according to the invention which have a fourth genetic modification, so that compared to their wild type they are capable of forming more fatty acids and fatty acid derivatives, in particular fatty acid esters, wax esters, hydrocarbons and fatty alcohols, from at least one simple carbon source. The document also describes enzymes Eₓ preferred according to the invention and the sequences thereof, particularly on pages 19 to 20, in table 10 and FIG. 10.

[0164] WO2011019858 A1 describes, particularly in paragraphs [0015] to [0020], [0064] to [0074], [0085] to [0086] and [0092] to [0099], practical examples 1 to 13, FIG. 1 and claims 1 to 14, microorganisms preferably used according to the invention which have a fourth genetic modification, so that compared to their wild type they are capable of forming more fatty acids and fatty acid derivatives, in particular fatty alcohols, from at least one simple carbon source. The document also describes enzymes Eₓ preferred according to the invention and the sequences thereof, particularly in paragraphs [0004] to [0007] and [0075] to [0080] and practical examples 1 to 13.

[0165] WO2009140695 A1 describes, particularly in paragraphs [0031] to [0040], [0051] and [0214] to [0233], practical examples 22 to 24, table 1, FIG. 40, practical examples 5 to 24 and 28 to 30 and claim 29, microorganisms preferably used according to the invention which have a fourth genetic modification, so that compared to their wild type they are capable of forming more fatty acids and fatty acid derivatives, in particular hydrocarbons, from at least one simple carbon source. The document also describes enzymes Eₓ preferred according to the invention and the sequences thereof, particularly in paragraphs [0023] to [0030], [0056], [0066] to [0069] and [0193] to [0208], table 1, FIG. 39, practical examples 5 to 24 and 28 to 30 and claims 69 to 74.

[0166] WO2011008535 A1 describes, particularly in paragraphs [0023] to [0024], and [0133] to [0158], FIG. 13, claims 39 and 45 to 47 and practical examples 1 to 5, microorganisms preferably used according to the invention which have a fourth genetic modification, so that compared to their wild type they are capable of forming more fatty acids and fatty acid derivatives, in particular carboxylic acids, hydroxycarboxylic acids and lactones thereof, from at least one simple carbon source. The document also describes enzymes Eₓ preferred according to the invention and the sequences thereof, particularly in paragraphs [0017] to [0022], [0084] to [0132], FIGS. 2 to 12, claims 31 to 37 and 40 to 44 and practical examples 1 to 5.

### Fifth Genetic Modification for Suppression of the Degradation of Carboxylic Acids- and Carboxylic Acid Derivatives

[0167] Also preferable according to the invention are microorganisms which have a fifth genetic modification which comprises, compared with the enzymatic activity of the wild type of the microorganism, decreased activity of at least one of the enzymes selected from the group

Eₐ Acyl-CoA synthetase, preferably of EC 6.2.1.3, which catalyses the synthesis of an acyl-coenzyme A thioester,
E_{b} Acyl-CoA dehydrogenase, preferably of EC 1.3.99.-, EC 1.3.99.3, or EC 1.3.99.13, which catalyses the oxidation of an acyl-coenzyme A thioester to the corresponding enoyl-coenzyme A thioester,
E_{c} Acyl-CoA-oxidase, preferably of EC 1.3.3.6, which catalyses the oxidation of an acyl-coenzyme A thioester to the corresponding enoyl-coenzyme A thioester,
E_{d} Enoyl-CoA hydratase, preferably of EC 4.2.1.17 or EC 4.2.1.74, which catalyses the hydration of an enoyl-coenzyme A thioester to the corresponding 3-hydroxyacyl-coenzyme A thioester,
Eₑ 3-hydroxyacyl-CoA dehydrogenase, preferably of EC 1.1.1.35 or EC 1.1.1.211, which catalyses the oxidation of a 3-hydroxyacyl-coenzyme A thioester to the corresponding 3-oxoacyl-coenzyme A thioester and
E_{f} Acetyl-CoA acyltransferase, preferably of EC 2.3.1.16, which catalyses the transfer of an acyl residue from a 3-oxoacyl-coenzyme A thioester to coenzyme A and thus creates an acyl-coenzyme A thioester shortened by two carbon atoms.

[0168] This has the technical effect that depletion of the carboxylic acids and carboxylate esters formed in increased quantity through the first genetic modification, but also of the ω-functionalized carboxylic acids and carboxylate esters formed in increased quantity through the second, third and fourth genetic modification, is prevented.

### Specific Enzymes Eₐ

[0169] It is also preferable according to the invention that the enzyme Eₐ in the cells according to the invention is one which comprises the sequence NP 416319.1.

and
proteins with a polypeptide sequence wherein up to 60%, preferably up to 25%, particularly preferably up to 15%, in particular up to 10, 9, 8, 7, 6, 5, 4, 3, 2 or 1% of the amino acid residues are modified by deletion, insertion, substitution or a combination thereof and which still possess at least 50%, preferably 65%, particularly preferably 80%, in particular more than 90% of the activity of the protein with the corresponding, aforementioned reference sequence, wherein 100% activity of the reference protein is understood to mean the increasing of the activity of the cells used as a biocatalyst, i.e. the quantity of substance converted per unit time based on the cell quantity used (units per gram cell dry weight [U/g CDW]) in comparison to the activity of the biocatalyst in the absence of the reference protein, wherein the activity in this connection and in connection with the determination of the activity of the enzyme Eₐ in general is understood to mean in particular the synthesis of dodecanoyl-CoA thioester.

### Specific Enzymes E_{b}

[0170] It is also preferable according to the invention that in the cells according to the invention the enzyme E_{b} is one which comprises sequences selected from:

AP_{—}000876.1, ZP_{—}08341828.1, YP_{—}002291517.1, ZP_{—}08393771.1, EFW53921.1, YP_{—}003227327.1, YP_{—}001461409.1, AEG35025.1, YP_{—}002385739.1, EGJ00024.1, ZP_{—}08352177.1, ZP_{—}03070250.1, ZP_{—}08367389.1, EGM63466.1, CBI99746.1, ZP_{—}06660773.1, ZP_{—}08372569.1, YP_{—}309282.2, YP_{—}001879017.1, YP_{—}003497883.1, ACI71032.1, YP_{—}002406464.1, EGB79412.1, EFZ76765.1, ZP_{—}07145000.1, ZP_{—}07151031.1, AAZ87047.1, EFZ56676.1, ZP_{—}06656148.1, EGB35012.1, EGB71054.1, EFW49392.1, ZP_{—}07183316.1, YP_{—}002396328.1, YP_{—}002327805.1, ZP_{—}03027602.1, AAG54546.1, YP_{—}001742341.1, ZP_{—}04538240.1, EFX12717.1, ACI71029.1, NP_{—}285938.2, ZP_{—}03064986.1, ZP_{—}07120505.1, YP_{—}539295.2, ZP_{—}03049609.1, ZP_{—}06652178.1, AAP15817.1, NP_{—}706224.3, ABI99723.1, EGB60663.1, EFW71911.1, EGH38574.1, YP_{—}668186.1, EGK29152.1, EGC05203.1, ZP_{—}02801146.2, YP_{—}687886.1, ZP_{—}08346491.1, EGJ94671.1, EGC94003.1, ZP_{—}08362542.1, YP_{—}002381459.1, AAN78852.1, NP_{—}752308.2, ZP_{—}07173894.1, ZP_{—}08357265.1, ZP_{—}08382276.1, ZP_{—}02902298.1, ZP_{—}04560694.1, ZP_{—}06354226.1, CBY94356.1, NP_{—}459307.1, EGE28353.1, ZP_{—}04657138.1, YP_{—}002225434.1, YP_{—}002635948.1, YP_{—}151638.1, ZP_{—}02663643.1, NP_{—}454921.1, YP_{—}004729161.1, YP_{—}215297.1, YP_{—}001454506.1, YP_{—}001571699.1, YP_{—}003363866.1, EGK30199.1, EGJ91900.1, EGK28208.1, ZP_{—}08497358.1, CBK85993.1, YP_{—}003611563.1, YP_{—}004592567.1, YP_{—}003441061.1, YP_{—}002240296.1, YP_{—}002917946.1, ZP_{—}06549304.1, ZP_{—}06017126.1, YP_{—}001333918.1, AAM28523.1, ZP_{—}08305363.1, YP_{—}001439185.1, EGL74026.1, YP_{—}001175495.1, ZP_{—}05968792.1, YP_{—}003209204.1, YP_{—}003943022.1, YP_{—}004499335.1, ZP_{—}06191708.1, YP_{—}001477183.1, ZP_{—}07951567.1, YP_{—}003740265.1, NP_{—}668276.1, ZP_{—}04637564.1, ZP_{—}04631714.1, CBY26031.1, YP_{—}004297237.1, YP_{—}001007400.1, ZP_{—}04625511.1, YP_{—}069424.1, ZP_{—}04616432.1, ZP_{—}04639135.1, YP_{—}001871363.1, ZP_{—}04620883.1, ZP_{—}06636999.1, ZP_{—}07377275.1, YP_{—}003929932.1, YP_{—}001722031.1, ZP_{—}04614013.1, ZP_{—}04628476.1, YP_{—}003713213.1, YP_{—}003530236.1, CBX79727.1, YP_{—}004114694.1, YP_{—}001908526.1, ADP11689.1, YP_{—}002649711.1, YP_{—}003469212.1, YP_{—}003519171.1, YP_{—}051564.1, ZP_{—}03833764.1, ZP_{—}03827249.1, NP_{—}928504.1, YP_{—}004211704.1, ZP_{—}07681706.1, YP_{—}003018849.1, YP_{—}003260788.1, YP_{—}003042091.1, ZP_{—}05973896.1, ZP_{—}03317495.1, ZP_{—}02958330.2, EFW60358.1, EGI98786.1, ZP_{—}06127315.2, YP_{—}002150121.1, ZP_{—}03842196.1, YP_{—}003884303.1, YP_{—}003003248.1, YP_{—}003334792.1, ZP_{—}03379559.1, CBA73629.1, YP_{—}002986552.1, ZP_{—}06538530.1, ZP_{—}01258771.1, ZP_{—}04921840.1, ZP_{—}06180371.1, ZP_{—}08308836.1, ZP_{—}06174994.1, YP_{—}001446380.1, ZP_{—}01237449.1, ZP_{—}01161468.1, ZP_{—}01222040.1, ZP_{—}06038476.1, ZP_{—}05925639.1, ZP_{—}06154677.1, ZP_{—}02195704.1, ZP_{—}01989646.1, ZP_{—}01868523.1, YP_{—}131060.1, ZP_{—}05722161.1, ZP_{—}05716057.1, NP_{—}798668.1, EGF45205.1, ZP_{—}05120764.1, EGR07881.1, ZP_{—}08100412.1, ZP_{—}04919383.1, ZP_{—}06054287.1, YP_{—}002156761.1, YP_{—}205315.2, ZP_{—}04961417.1, ZP_{—}06050299.1, ZP_{—}08103013.1, ZP_{—}01949008.1, NP_{—}231862.1, AEA79156.1, ZP_{—}06081122.1, ZP_{—}04418155.1, YP_{—}001217747.1, ZP_{—}04413631.1, NP_{—}935312.1, ZP_{—}01977990.1, NP_{—}760770.1, YP_{—}004188005.1, YP_{—}002810906.1, ZP_{—}05884155.1, ZP_{—}05946273.1, ZP_{—}01065180.1, ZP_{—}01815735.1, YP_{—}002417909.1, YP_{—}002263750.1, YP_{—}856109.1, ZP_{—}07744057.1, ZP_{—}08520214.1, ZP_{—}06034047.1, YP_{—}004565576.1, ZP_{—}05881167.1, ZP_{—}00991316.1, YP_{—}734276.1, ADT86286.1, YP_{—}001142550.1, YP_{—}869958.1, ZP_{—}08566610.1, ZP_{—}05876732.1, YP_{—}001366225.1, YP_{—}001094233.1, ADV54653.1, YP_{—}963612.1, YP_{—}738268.1, YP_{—}001502248.1, YP_{—}004391846.1, YP_{—}002311644.1, YP_{—}002358241.1, YP_{—}001050670.1, ZP_{—}07390237.1, YP_{—}001674114.1, YP_{—}001554497.1, NP_{—}718122.1, YP_{—}001760976.1, YP_{—}927745.1, YP_{—}562771.1, YP_{—}003557130.1, ZP_{—}02159449.1, YP_{—}003913548.1, YP_{—}001473736.1, YP_{—}750554.1, ZP_{—}01897495.1, YP_{—}268985.1, ZP_{—}01042474.1, ZP_{—}08570996.1, YP_{—}004427315.1, ZP_{—}07010199.1, YP_{—}156047.1, ZP_{—}07097521.1, YP_{—}004467113.1, ZP_{—}01614110.1, YP_{—}340459.1, YP_{—}004434754.1, YP_{—}662062.1, YP_{—}004068195.1, ZP_{—}08409704.1, ZP_{—}08622396.1, ZP_{—}01135962.1, ZP_{—}03560927.1, ZP_{—}04716612.1, EGB41427.1, EGP48304.1, EFV84045.1, ZP_{—}08505249.1, ZP_{—}06688896.1, YP_{—}003980530.1, YP_{—}003168652.1, YP_{—}003146346.1, YP_{—}001250478.1, YP_{—}095752.1, YP_{—}124009.1, CBW99992.1, YP_{—}284763.1, YP_{—}127029.1, YP_{—}746940.1, ZP_{—}07663653.1, ZP_{—}03349444.1, YP_{—}002354470.1, YP_{—}004145615.1, YP_{—}003524477.1, ZP_{—}03698069.1, YP_{—}003376672.1, ZP_{—}06188282.1, EFW81359.1, EGH83675.1, EGH67821.1, EFW83732.1, YP_{—}273865.1, NP_{—}902393.1, ZP_{—}06457469.1, EGH99235.1, ZP_{—}03397893.1, ZP_{—}07004262.1, ZP_{—}06732661.1, ZP_{—}07263971.1, EGH75297.1, NP_{—}888341.1, EGH31566.1, EGH45251.1, NP_{—}643363.1, EGH24154.1, EGH92666.1, EGH73945.1, EGH12424.1, NP_{—}793629.1, ZP_{—}06705890.1, YP_{—}234714.1, EGH62932.1, EGH52925.1, ZP_{—}01126966.1, NP_{—}841588.1, ZP_{—}05109483.1, YP_{—}003847638.1, YP_{—}004294524.1, ZP_{—}02244088.1, NP_{—}884586.1, ZP_{—}08176463.1, ZP_{—}04588788.1, YP_{—}450732.1, ZP_{—}08185386.1, YP_{—}001914265.1, YP_{—}003527565.1, YP_{—}004696148.1, NP_{—}638218.1, ZP_{—}05046817.1, YP_{—}343737.1, ZP_{—}07652844.1, YP_{—}004227922.1, YP_{—}364921.1, YP_{—}001632020.1, NP_{—}744048.1, YP_{—}001898007.1, YP_{—}003145987.1, YP_{—}558241.1, YP_{—}410795.1, YP_{—}001895310.1, YP_{—}002980410.1, ZP_{—}06841648.1, YP_{—}258889.1, YP_{—}931967.1, YP_{—}003760619.1, YP_{—}002029446.1, YP_{—}004474743.1, YP_{—}158312.1, YP_{—}004380764.1, YP_{—}001973352.1, CBJ39115.1, YP_{—}349912.1, YP_{—}003753442.1, ZP_{—}05135288.1, YP_{—}004700980.1, YP_{—}927690.1, YP_{—}001269130.1, YP_{—}742956.1, ADR61321.1, YP_{—}001347709.1, YP_{—}004355482.1, YP_{—}003907207.1, NP_{—}251505.1, ZP_{—}04929120.1, NP_{—}518658.1, YP_{—}002871500.1, ZP_{—}01451059.1, EGM21899.1, YP_{—}001187411.1, ZP_{—}08570514.1, ZP_{—}07794119.1, YP_{—}004391835.1, YP_{—}002256385.1, ZP_{—}07774414.1, YP_{—}855885.1, YP_{—}563120.1, YP_{—}001172167.1, YP_{—}004713921.1, ZP_{—}08138366.1, AEA83572.1, YP_{—}003746704.1, ZP_{—}08521441.1, ZP_{—}05061205.1, YP_{—}001667709.1, YP_{—}750573.1, YP_{—}607261.1, ZP_{—}05118288.1, YP_{—}002311716.1, NP_{—}718079.1, YP_{—}003777020.1, ZP_{—}06052248.1, ZP_{—}00943163.1, ZP_{—}08309312.1, AEG70141.1, YP_{—}001748377.1, YP_{—}001857928.1, YP_{—}001094176.1, YP_{—}003604813.1, ZP_{—}01947893.1,
in particular
EFW81359.1, EGH83675.1, EGH67821.1, EFW83732.1, YP_{—}273865.1, ZP_{—}06457469.1, EGH99235.1, ZP_{—}03397893.1, ZP_{—}07004262.1, ZP_{—}07263971.1, EGH75297.1, EGH31566.1, EGH45251.1, EGH24154.1, EGH92666.1, EGH73945.1, EGH12424.1, NP_{—}793629.1, YP_{—}234714.1, EGH62932.1, EGH52925.1, ZP_{—}04588788.1, NP_{—}744048.1, YP_{—}258889.1, YP_{—}004474743.1, YP_{—}004380764.1, YP_{—}349912.1, YP_{—}004700980.1, YP_{—}001269130.1, ADR61321.1, YP_{—}001347709.1, YP_{—}004355482.1, NP_{—}251505.1, ZP_{—}04929120.1, YP_{—}002871500.1, EGM21899.1, YP_{—}001187411.1, ZP_{—}07794119.1, ZP_{—}07774414.1, YP_{—}001172167.1, YP_{—}004713921.1, ZP_{—}08138366.1, AEA83572.1, YP_{—}001667709.1, YP_{—}607261.1, YP_{—}001748377.1, YP_{—}260045.1, YP_{—}002873091.1, ZP_{—}07775826.1, CAC34855.1, EGH11916.1, ZP_{—}05641615.1, ZP_{—}06480669.1, ZP_{—}06480668.1, ZP_{—}05641616.1, ZP_{—}06492823.1, ZP_{—}06492821.1, EGH11920.1, EGH25319.1, ZP_{—}06492824.1, ADX52254.1, AP_{—}000876.1, ZP_{—}08341828.1, YP_{—}002291517.1, YP_{—}003227327.1, YP_{—}001461409.1, AEG35025.1, YP_{—}002385739.1, ZP_{—}08352177.1, ZP_{—}03070250.1, ZP_{—}08367389.1, CBI99746.1, ZP_{—}06660773.1, ZP_{—}08372569.1, YP_{—}003497883.1, ACI71032.1, YP_{—}002406464.1, EGB79412.1, EFZ76765.1, ZP_{—}07145000.1, ZP_{—}07151031.1, EFZ56676.1, ZP_{—}06656148.1, EGB35012.1, EGB71054.1, ZP_{—}07183316.1, YP_{—}002396328.1, YP_{—}002327805.1, ZP_{—}03027602.1, AAG54546.1, YP_{—}001742341.1, ABE05764.1, EFX12717.1, ACI71029.1, NP_{—}285938.2, ZP_{—}07120505.1, YP_{—}539295.2, ZP_{—}03049609.1, ZP_{—}06652178.1, ABI99723.1, EGB60663.1, EFW71911.1, EGH38574.1, YP_{—}668186.1, ZP_{—}02801146.2, ZP_{—}08346491.1, ZP_{—}08362542.1, AAN78852.1, NP_{—}752308.2, ZP_{—}07173894.1, ZP_{—}08357265.1, ZP_{—}08382276.1, AAM28523.1, ZP_{—}07097521.1, EGB41427.1, EGB41426.1, BAA07583.1, ZP_{—}07100038.1, CAX20347.1
and particularly preferably
NP_{—}744048.1, YP_{—}004700980.1, YP_{—}001269130.1, ADR61321.1, YP_{—}001667709.1, YP_{—}001748377.1, YP_{—}258889.1, YP_{—}349912.1, YP_{—}002871500.1, ZP_{—}07774414.1, YP_{—}260045.1, YP_{—}002873091.1, ZP_{—}07775826.1, CAC34855.1, YP_{—}001172167.1, YP_{—}004713921.1, AEA83572.1, AP_{—}000876.1, BAA07583.1, ZP_{—}07594808.1.
and
proteins with a polypeptide sequence wherein up to 60%, preferably up to 25%, particularly preferably up to 15%, in particular up to 10, 9, 8, 7, 6, 5, 4, 3, 2 or 1% of the amino acid residues compared to the aforementioned reference sequences are modified by deletion, insertion, substitution or a combination thereof and which still possess at least 50%, preferably 65%, particularly preferably 80%, in particular more than 90% of the activity of the protein with the corresponding, aforementioned reference sequence, wherein 100% activity of the reference protein is understood to mean the increasing of the activity of the cells used as a biocatalyst, i.e. the quantity of substance converted per unit time based on the cell quantity used (units per gram cell dry weight [U/g CDW]) in comparison to the activity of the biocatalyst in the absence of the reference protein, wherein the activity in this connection and in connection with the determination of the activity of the enzyme E_{b} in general is understood to mean in particular the oxidation of dodecanoyl-CoA thioesters to 2-dodecenoyl-CoA thioesters.

### Specific Enzymes E_{c}

[0171] It is also preferable according to the invention that in the cells according to the invention the enzyme E_{c} is one which comprises sequences selected from:

YP_{—}003571780.1, YP_{—}445820.1, YP_{—}634556.1, YP_{—}004665862.1, ZP_{—}01461690.1, YP_{—}921666.1, YP_{—}002778910.1, ZP_{—}08550394.1, YP_{—}003384289.1, YP_{—}001195727.1, YP_{—}702012.1, ZP_{—}04384437.1, YP_{—}002765110.1, ZP_{—}04996322.1, ZP_{—}08195144.1, ZP_{—}04700546.1, YP_{—}954595.1, YP_{—}004736804.1, ADW07059.1, YP_{—}001827916.1, ZP_{—}04691466.1, YP_{—}001109453.1, ZP_{—}08240125.1, YP_{—}003272226.1, YP_{—}004053469.1, ZP_{—}06272176.1, YP_{—}004491616.1, YP_{—}001133991.1, YP_{—}001071715.1, YP_{—}290295.1, YP_{—}003193744.1, YP_{—}001704317.1, YP_{—}004008413.1, YP_{—}004655806.1, YP_{—}640598.1, ZP_{—}08153802.1, ZP_{—}00995173.1, ZP_{—}05225674.1, YP_{—}888747.1, YP_{—}003114111.1, YP_{—}004522832.1, ZP_{—}06848773.1, ZP_{—}08203814.1, YP_{—}001851901.1, EGO40578.1, YP_{—}003134974.1, ZP_{—}07282448.1, YP_{—}003770185.1, YP_{—}881295.1, YP_{—}004336131.1, NP_{—}961035.1, YP_{—}004164861.1, YP_{—}003681133.1, ZP_{—}04749633.1, ZP_{—}07718288.1, ZP_{—}01201898.1, YP_{—}004223976.1, YP_{—}118690.1, YP_{—}905275.1, BAE47462.1, YP_{—}831622.1, YP_{—}003407476.1, ZP_{—}01129477.1, YP_{—}003645654.1, YP_{—}004454693.1, YP_{—}002487953.1, YP_{—}004084231.1, YP_{—}003836912.1, YP_{—}004241154.1, ZP_{—}07706098.1, YP_{—}001855531.1, ZP_{—}08124588.1, YP_{—}947882.1, BAE47461.1, YP_{—}003327670.1, YP_{—}001363757.1, YP_{—}004601796.1, YP_{—}001625220.1, YP_{—}003638017.1, ZP_{—}06501585.1, YP_{—}004404736.1, YP_{—}062974.1, YP_{—}002957230.1, YP_{—}003316209.1, YP_{—}003149881.1, YP_{—}001221553.1, YP_{—}003162313.1, ZP_{—}03978917.1, YP_{—}001708860.1, ZP_{—}05912043.1, ZP_{—}06806059.1, YP_{—}003155732.1, YP_{—}002835700.1, YP_{—}003916799.1, ZP_{—}03936415.1, ZP_{—}07090640.1, ZP_{—}08516453.1, AAB97825.1, YP_{—}004541029.1, YP_{—}004606508.1, YP_{—}001801238.1, ZP_{—}07989876.1, YP_{—}004761186.1, YP_{—}002883572.1, ZP_{—}08023616.1, ZP_{—}05847263.1, YP_{—}251740.1, ZP_{—}03394212.1, YP_{—}001107648.1, YP_{—}002872770.1, YP_{—}001821654.1, ZP_{—}08233739.1, AAD12170.1, ZP_{—}08215859.1, AAD40800.1, ZP_{—}05005905.1, ADW07311.1, YP_{—}348592.1, NP_{—}824883.1, NP_{—}627459.1, YP_{—}001828149.1, ZP_{—}05525554.1, ZP_{—}08240364.1, ZP_{—}07299658.1, ZP_{—}06582153.1, ZP_{—}06921827.1, ZP_{—}04703961.1, BAJ27090.1, ZP_{—}06592678.1, ZP_{—}04691265.1, YP_{—}001751500.1, BAJ31579.1, preferably YP_{—}003571780.1, YP_{—}445820.1, YP_{—}634556.1, YP_{—}004665862.1, ZP_{—}01461690.1, YP_{—}921666.1, YP_{—}002778910.1, ZP_{—}08550394.1, YP_{—}003384289.1, YP_{—}001195727.1, YP_{—}702012.1, ZP_{—}04384437.1, YP_{—}002765110.1, ZP_{—}04996322.1, ZP_{—}08195144.1, ZP_{—}04700546.1, YP_{—}954595.1, YP_{—}004736804.1, ADW07059.1, YP_{—}001827916.1, ZP_{—}04691466.1, YP_{—}001109453.1, ZP_{—}08240125.1, YP_{—}003272226.1, YP_{—}004053469.1, ZP_{—}06272176.1, YP_{—}004491616.1, YP_{—}001133991.1, YP_{—}001071715.1, YP_{—}290295.1, YP_{—}003193744.1, YP_{—}001704317.1, YP_{—}004008413.1, YP_{—}004655806.1, YP_{—}640598.1, ZP_{—}08153802.1, ZP_{—}00995173.1, ZP_{—}05225674.1, YP_{—}888747.1, YP_{—}003114111.1, YP_{—}004522832.1, ZP_{—}06848773.1, ZP_{—}08203814.1, YP_{—}001851901.1, EGO40578.1, YP_{—}003134974.1, ZP_{—}07282448.1, YP_{—}003770185.1, YP_{—}881295.1, YP_{—}004336131.1, NP_{—}961035.1, YP_{—}004164861.1, YP_{—}003681133.1, ZP_{—}04749633.1, ZP_{—}07718288.1, ZP_{—}01201898.1, YP_{—}004223976.1, YP_{—}118690.1, YP_{—}905275.1, BAE47462.1, YP_{—}831622.1, YP_{—}003407476.1, ZP_{—}01129477.1, YP_{—}003645654.1, YP_{—}004454693.1, YP_{—}002487953.1, YP_{—}004084231.1, YP_{—}003836912.1, YP_{—}004241154.1, ZP_{—}07706098.1, YP_{—}001855531.1, ZP_{—}08124588.1, YP_{—}947882.1, BAE47461.1, YP_{—}003327670.1, YP_{—}001363757.1, YP_{—}004601796.1, YP_{—}001625220.1, YP_{—}003638017.1, ZP_{—}06501585.1, YP_{—}004404736.1, YP_{—}062974.1, YP_{—}002957230.1, YP_{—}003316209.1, YP_{—}003149881.1, YP_{—}001221553.1, YP_{—}003162313.1, ZP_{—}03978917.1, YP_{—}001708860.1, ZP_{—}05912043.1, ZP_{—}06806059.1, YP_{—}003155732.1, YP_{—}002835700.1, YP_{—}003916799.1, ZP_{—}03936415.1, ZP_{—}07090640.1, ZP_{—}08516453.1, AAB97825.1, YP_{—}004541029.1, YP_{—}004606508.1, YP_{—}001801238.1, ZP_{—}07989876.1, YP_{—}004761186.1, YP_{—}002883572.1, ZP_{—}08023616.1, ZP_{—}05847263.1, YP_{—}251740.1,
and particularly preferably YP_{—}002835700.1, ZP_{—}03936415.1, BAE47461.1, YP_{—}001801238.1, ZP_{—}03978917.1, ZP_{—}03394212.1, ZP_{—}05847263.1, ZP_{—}08516453.1, YP_{—}004606508.1, YP_{—}251740.1, ZP_{—}07090640.1, ZP_{—}07989876.1, YP_{—}004761186.1,
and
proteins with a polypeptide sequence wherein up to 60%, preferably up to 25%, particularly preferably up to 15%, in particular up to 10, 9, 8, 7, 6, 5, 4, 3, 2 or 1% of the amino acid residues compared to the aforementioned reference sequences are modified by deletion, insertion, substitution or a combination thereof and which still possess at least 50%, preferably 65%, particularly preferably 80%, in particular more than 90% of the activity of the protein with the corresponding, aforementioned reference sequence, wherein 100% activity of the reference protein is understood to mean the increasing of the activity of the cells used as a biocatalyst, i.e. the quantity of substance converted per unit time based on the cell quantity used (units per gram cell dry weight [U/g CDW]) in comparison to the activity of the biocatalyst in the absence of the reference protein, wherein the activity in this connection and in connection with the determination of the activity of the enzyme E_{c} in general is understood to mean in particular the oxidation of dodecanoyl-CoA thioesters to 2-dodecenoyl-CoA thioesters.

### Specific Enzymes E_{d} and Eₑ

[0172] It is also preferable according to the invention that in the cells according to the invention the enzyme E_{d} or Eₑ is one which comprises sequences selected from:

ZP_{—}07164313.1, NP_{—}418288.1, YP_{—}003231641.1, EGM59778.1, EFZ53307.1, AAA23750.1, ZP_{—}07192215.1, YP_{—}001460638.1, YP_{—}001727088.1, EGK16564.1, ZP_{—}08380619.1, ZP_{—}07136310.1, CAB40809.1, NP_{—}839030.1, ZP_{—}07690617.1, EGC97039.1, ZP_{—}07103516.1, ZP_{—}03027888.1, ZP_{—}07121980.1, YP_{—}002414996.1, EGP22873.1, EGJ82677.1, EGB59499.1, ZP_{—}07118761.1, YP_{—}002409078.1, YP_{—}002295407.1, EGE62412.1, EGB69560.1, ZP_{—}06655948.1, ZP_{—}06664574.1, ZP_{—}03070699.1, ZP_{—}07145404.1, ZP_{—}08376058.1, EGB85466.1, ZP_{—}07189176.1, ZP_{—}02999920.1, ZP_{—}08356523.1, ZP_{—}06659936.1, ZP_{—}07139396.1, YP_{—}001746178.1, YP_{—}002384700.1, ZP_{—}07098889.1, CBG37051.1, ZP_{—}04873109.1, CBJ03626.1, ZP_{—}08366395.1, ZP_{—}03066301.1, BAI57243.1, YP_{—}001465330.1, YP_{—}405325.1, NP_{—}312801.1, EGI89589.1, EGC09628.1, EFW73050.1, ZP_{—}07221474.1, EGB39932.1, EFW72281.1, ZP_{—}07154547.1, YP_{—}002331616.1, EGB76756.1, EFZ75005.1, ZP_{—}07449248.1, NP_{—}756652.2, ZP_{—}04006347.1, NP_{—}290476.1, EGH36687.1, YP_{—}671920.1, ZP_{—}08350773.1, EGC05062.1, ZP_{—}07174622.1, CAP78309.1, ZP_{—}08361145.1, YP_{—}002400350.1, ZP_{—}08386169.1, EFU60028.1, ZP_{—}02904283.1, YP_{—}859447.1, YP_{—}543379.2, NP_{—}462868.1, ZP_{—}02663494.1, ACY91152.1, ZP_{—}03221347.1, YP_{—}001591071.1, YP_{—}002639596.1, EFY10009.1, ZP_{—}04656823.1, ZP_{—}03213459.1, ZP_{—}02701437.1, ZP_{—}02347126.1, YP_{—}002217909.1, ZP_{—}02658976.1, YP_{—}002245833.1, YP_{—}002228260.1, YP_{—}001451793.1, EGE35935.1, YP_{—}002047992.1, ZP_{—}02834645.1, ZP_{—}02669606.1, YP_{—}001572623.1, ZP_{—}03075319.1, YP_{—}002148908.1, YP_{—}004591813.1, ZP_{—}03163685.1, YP_{—}002043211.1, NP_{—}457769.1, YP_{—}003367347.1, YP_{—}004732313.1, ZP_{—}06546517.1, ZP_{—}08495782.1, ZP_{—}04558441.1, YP_{—}002241091.1, ZP_{—}06354348.2, ZP_{—}06552493.1, YP_{—}001337975.1, YP_{—}001178655.1, CBK87780.1, ZP_{—}05970964.1, ZP_{—}06014071.1, YP_{—}002917176.1, YP_{—}152910.1, Q9F0Y7.1, ZP_{—}08302760.1, YP_{—}003615422.1, YP_{—}003943709.1, EGI93642.1, YP_{—}001439747.1, YP_{—}003208640.1, YP_{—}001476499.1, ZP_{—}06638309.1, YP_{—}004498688.1, YP_{—}004296470.1, ZP_{—}06192594.1, YP_{—}001004653.1, ZP_{—}04634366.1, CBY29055.1, ZP_{—}04641538.1, ZP_{—}04628383.1, ZP_{—}04620754.1, ZP_{—}04624649.1, YP_{—}003739635.1, ZP_{—}07953302.1, YP_{—}001399280.1, NP_{—}667802.1, YP_{—}068813.1, ADV97208.1, ZP_{—}04637125.1, YP_{—}003019595.1, YP_{—}048335.1, ZP_{—}04612255.1, ZP_{—}03831342.1, ZP_{—}03827989.1, YP_{—}003261565.1, ZP_{—}04616540.1, EFW54755.1, YP_{—}004214864.1, BAK13441.1, YP_{—}003518496.1, YP_{—}003933023.1, ZP_{—}07380063.1, YP_{—}003042702.1, YP_{—}003713991.1, YP_{—}003466462.1, YP_{—}004114076.1, YP_{—}001906200.1, NP_{—}931575.1, EGK17810.1, CBX79037.1, YP_{—}003529581.1, ZP_{—}06937250.1, YP_{—}002647270.1, ADP11112.1, ZP_{—}05974166.1, ZP_{—}03318464.1, ZP_{—}02958886.1, YP_{—}003331802.1, ZP_{—}06125606.1, YP_{—}003006180.1, YP_{—}003885045.1, YP_{—}128321.1, ZP_{—}01236908.1, ZP_{—}01161145.1, YP_{—}002989323.1, YP_{—}002154796.1, YP_{—}203408.1, ZP_{—}08310903.1, YP_{—}002264299.1, ZP_{—}01221704.1, ZP_{—}06050960.1, ZP_{—}03841335.1, ZP_{—}05883431.1, YP_{—}002153226.1, ADT85583.1, ZP_{—}05879947.1, ZP_{—}04923724.1, ZP_{—}01262258.1, ZP_{—}06179383.1, ZP_{—}05883853.1, EGF42158.1, ZP_{—}01957954.1, ZP_{—}08101926.1, ZP_{—}06177050.1, NP_{—}759944.1, NP_{—}796409.1, ZP_{—}04419618.1, ZP_{—}01987794.1, ZP_{—}05121182.1, YP_{—}001443702.1, ZP_{—}01948571.1, ZP_{—}01682057.1, ZP_{—}04405432.1, NP_{—}232384.1, ZP_{—}04409574.1, ZP_{—}01870127.1, NP_{—}932822.1, ZP_{—}06943917.1, EGR05147.1, ZP_{—}04961951.1, EGR10674.1, ZP_{—}04414292.1, ZP_{—}05718020.1, ZP_{—}08098153.1, ZP_{—}05719938.1, ZP_{—}03356468.1, ZP_{—}07742015.1, YP_{—}004564872.1, ZP_{—}01979859.1, ZP_{—}00992843.1, ZP_{—}05927571.1, ZP_{—}01065523.1, YP_{—}002415749.1, ZP_{—}01815881.1, ZP_{—}02196043.1, YP_{—}001143922.1, ZP_{—}08518445.1, ZP_{—}06156529.1, YP_{—}004394586.1, ZP_{—}01900693.1, YP_{—}854676.1, ZP_{—}05943242.1, CBA71812.1, ZP_{—}01991723.1, YP_{—}001092151.1, YP_{—}001672251.1, YP_{—}961420.1, YP_{—}003554801.1, YP_{—}003911300.1, ADV52504.1, YP_{—}001364252.1, YP_{—}001552462.1, ZP_{—}07394327.1, YP_{—}001048426.1, YP_{—}002355987.1, ZP_{—}02158912.1, ABE53312.1, YP_{—}561035.2, YP_{—}748714.1, ZP_{—}01135242.1, NP_{—}715663.1, YP_{—}732157.1, YP_{—}867675.1, YP_{—}736079.1, YP_{—}001758417.1, YP_{—}001499882.1, YP_{—}004436299.1, YP_{—}659787.1, ZP_{—}08620874.1, YP_{—}002309470.1, CBW44433.1, ZP_{—}08568624.1, YP_{—}958423.1, YP_{—}925914.1, YP_{—}001471764.1, ZP_{—}01165107.1, ZP_{—}04717156.1, ZP_{—}01042072.1, ZP_{—}08568929.1, YP_{—}004468425.1, ZP_{—}01614054.1, EGH60623.1, NP_{—}744285.1, ZP_{—}04587907.1, EGH84450.1, YP_{—}609235.1, Q93Q12.1, ZP_{—}07263341.1, YP_{—}004425808.1, EGH10831.1, ZP_{—}08142928.1, YP_{—}435877.1, YP_{—}004701152.1, ADR61111.1, EGH72107.1, ZP_{—}07255969.1, EGH76237.1, YP_{—}154404.1, EGH66371.1, ZP_{—}07005687.1, YP_{—}001268914.1, ZP_{—}03397164.1, YP_{—}267151.1, EGH45982.1, NP_{—}793297.1, YP_{—}236360.1, YP_{—}001667915.1, EGH29726.1, ZP_{—}03561781.1, YP_{—}275370.1, ABP88736.1, ZP_{—}06458302.1, YP_{—}001748526.1, YP_{—}002871195.1, ZP_{—}06478839.1, EGH95845.1, YP_{—}004067126.1, EGH21541.1, ZP_{—}05638744.1, Q9AHY3.2, YP_{—}338568.1, ZP_{—}06078672.1, YP_{—}004352961.1, ZP_{—}01892768.1, ZP_{—}06040413.1, YP_{—}349607.1, YP_{—}259059.1, ZP_{—}08409548.1, ADP97276.1, YP_{—}004713990.1, YP_{—}003626258.1, P28793.1, YP_{—}001172246.1, YP_{—}003810247.1, YP_{—}004313957.1, EGE21928.1, EGE19309.1, EGE13641.1, ZP_{—}08462037.1, EGE13529.1, ZP_{—}06034789.1, EGE12165.1, AEA83639.1, YP_{—}002798635.1, ZP_{—}01306165.1, YP_{—}004474976.1, ZP_{—}01739261.1, NP_{—}251704.1, ACP17923.1, YP_{—}004379416.1, YP_{—}001280990.1, YP_{—}003145204.1, YP_{—}001347517.1, ZP_{—}06877966.1, YP_{—}001187076.1, ZP_{—}08638729.1, YP_{—}001340441.1, ZP_{—}05128804.1, YP_{—}003896827.1, YP_{—}003073151.1, ZP_{—}05096745.1, ZP_{—}01103278.1, YP_{—}693372.1, ZP_{—}01366482.1, ZP_{—}05619303.1, ZP_{—}08328596.1, ZP_{—}05042935.1, YP_{—}574439.1, ZP_{—}01074264.1, YP_{—}004482149.1, YP_{—}045111.1, YP_{—}265216.1, ZP_{—}05362445.1, YP_{—}001715228.1, YP_{—}001844981.1, YP_{—}001708314.1, YP_{—}581488.1, ADY83798.1, ZP_{—}06692406.1, YP_{—}003733838.1, ZP_{—}05824704.1, ZP_{—}06058514.1, ZP_{—}08554004.1, ZP_{—}06068411.1, ZP_{—}06067277.1, ZP_{—}06726497.1, ADX01983.1, ZP_{—}03822268.1, ZP_{—}03347927.1, ZP_{—}01116792.1, YP_{—}527079.1, ZP_{—}06063435.1, ZP_{—}06534677.1, ZP_{—}01219812.1, ZP_{—}03347768.1, YP_{—}002798829.1, ZP_{—}07774142.1, YP_{—}003557881.1, ZP_{—}06157092.1, ZP_{—}01223872.1, ZP_{—}05946076.1, ZP_{—}06499586.1, YP_{—}003451185.1, YP_{—}002361722.1, YP_{—}003266103.1, YP_{—}285556.2, AAZ47086.1, NP_{—}968701.1, ZP_{—}06936670.1, ZP_{—}03805048.1, YP_{—}943922.1, ZP_{—}01217009.1, ADT87675.1, ZP_{—}05877956.1, ZP_{—}03355309.1, ZP_{—}05885304.1, EGK17811.1, ZP_{—}05944972.1,
ZP_{—}05119053.1, ZP_{—}06039619.1, ZP_{—}05716842.1, ZP_{—}05721090.1, ZP_{—}06079171.1, ZP_{—}06033023.1, ZP_{—}08098475.1, ZP_{—}08104504.1, ZP_{—}06048048.1, ZP_{—}01677170.1, ZP_{—}01681193.1, NP_{—}230692.2, ZP_{—}05926205.1, ZP_{—}05881372.1, ZP_{—}01975051.1, ZP_{—}04412573.1, ZP_{—}01977591.1, ZP_{—}04415061.1, ZP_{—}06048243.1, YP_{—}742943.1, ZP_{—}04962518.1, ZP_{—}01955504.1, ZP_{—}07741831.1, EGK33112.1, ZP_{—}01980800.1, CBW26643.1, EGQ99075.1, ZP_{—}03561616.1, ZP_{—}06155835.1, ZP_{—}01613403.1, YP_{—}003147156.1, ZP_{—}01866421.1, ZP_{—}08569601.1, YP_{—}004068133.1, ZP_{—}01992793.1, YP_{—}003760621.1, NP_{—}760849.1, NP_{—}935233.1, YP_{—}661240.1, CBA76402.1, YP_{—}003527567.1, ZP_{—}05071916.1, YP_{—}155382.1, ZP_{—}08567109.1, ZP_{—}08410490.1, YP_{—}002357526.1, YP_{—}001473368.1, ZP_{—}05061211.1, ZP_{—}08309062.1, ZP_{—}00990722.1, ZP_{—}01813160.1, YP_{—}343735.1, YP_{—}001366977.1, ZP_{—}07393465.1, YP_{—}002312436.1, ZP_{—}03805047.1, ZP_{—}04716066.1, ZP_{—}01043968.1, YP_{—}562538.1, ZP_{—}01064421.1, YP_{—}928042.1, YP_{—}002416486.1, YP_{—}962941.1, YP_{—}001051116.1, YP_{—}004467793.1, YP_{—}004434876.1, YP_{—}001183979.1, ZP_{—}01125518.1, YP_{—}001555281.1, ZP_{—}01900341.1, YP_{—}001459147.1, ADV54930.1, ZP_{—}06054161.1, YP_{—}001674882.1, YP_{—}001381324.1, ZP_{—}02158374.1, NP_{—}718651.1, YP_{—}737529.1, YP_{—}869101.1, ZP_{—}01258852.1, ZP_{—}05978956.1, ZP_{—}06179776.1, YP_{—}733543.1, ZP_{—}01989664.1, NP_{—}798587.1, EGF45285.1, ZP_{—}05908370.1, YP_{—}001502453.1, ZP_{—}06639387.1, YP_{—}003557654.1, ZP_{—}04921889.1, YP_{—}001436988.1, YP_{—}003468880.1, YP_{—}001761392.1, YP_{—}003267851.1, YP_{—}004730996.1, EGL72460.1, YP_{—}003742516.1, YP_{—}003258850.1, ZP_{—}01132697.1, ZP_{—}01987078.1, YP_{—}004392689.1, ZP_{—}06191156.1, YP_{—}002381996.1, ZP_{—}06176023.1, EGC06853.1, ZP_{—}07196084.1, NP_{—}754768.1, ZP_{—}02901855.1, ZP_{—}08620438.1, EGE30558.1, YP_{—}003211325.1, ZP_{—}03220131.1, YP_{—}217377.1, YP_{—}003940937.1, YP_{—}004669896.1, YP_{—}633521.1, YP_{—}002041652.1, NP_{—}456929.1, YP_{—}001446296.1, ZP_{—}02699767.1, YP_{—}001586838.1, YP_{—}751355.1, ZP_{—}08384609.1, YP_{—}002216460.1, A8GH86.2, ZP_{—}02667448.1, YP_{—}004595105.1, YP_{—}002408448.1, YP_{—}001479604.1, YP_{—}149790.1, NP_{—}461330.1, YP_{—}002227302.1, ZP_{—}07187886.1, ZP_{—}08374604.1, ZP_{—}02343362.1, ZP_{—}02683558.1, YP_{—}001141958.1, ZP_{—}02662473.1, ZP_{—}07151809.1, YP_{—}004211957.1, YP_{—}003366276.1, YP_{—}003713364.1, ZP_{—}03035287.1, ZP_{—}08364768.1, YP_{—}002413389.1, ZP_{—}07448710.1, ZP_{—}04656170.1, ZP_{—}02654823.1, ZP_{—}01222785.1, EGB63194.1, ZP_{—}08359459.1, YP_{—}002636921.1, YP_{—}002329984.1, YP_{—}001744544.1, CAP76837.1, EFZ73229.1, EFU57443.1, YP_{—}002398712.1, YP_{—}003018387.1, ZP_{—}08520753.1, YP_{—}541623.1, ZP_{—}02574174.1, ZP_{—}07144040.1, ZP_{—}08349090.1, CBG35413.1, ZP_{—}04562847.1, ZP_{—}02195785.1, ZP_{—}02773221.1, EGB40918.1, ZP_{—}03050715.1, ZP_{—}07787570.1, ZP_{—}03831301.1, YP_{—}003003682.1, ZP_{—}08354786.1, YP_{—}051168.1, YP_{—}002403607.1, AEE57458.1, YP_{—}856678.1, YP_{—}001177597.1, ZP_{—}06658276.1, NP_{—}288914.1, YP_{—}002392166.1, ZP_{—}06654274.1, ZP_{—}07102361.1, EGB72544.1, YP_{—}004501987.1, ZP_{—}03027319.1, YP_{—}670274.1, YP_{—}003913906.1, ZP_{—}07097669.1, YP_{—}001463687.1, BAI55757.1, ZP_{—}08553509.1, YP_{—}003500399.1, ZP_{—}07121648.1, ZP_{—}01235780.1, CBK87125.1, YP_{—}002293925.1, ZP_{—}05431367.1, YP_{—}129175.1, ZP_{—}03003629.1, YP_{—}002387809.1, ZP_{—}03043524.1, YP_{—}001569579.1, ZP_{—}05435840.1, ZP_{—}01464666.1, YP_{—}001724305.1, ZP_{—}03068335.1, CBJ01980.1, AEJ57562.1, NP_{—}416843.1, YP_{—}002920590.1, ZP_{—}03828462.1, EGM60943.1, ZP_{—}06351976.1, ZP_{—}05968584.1, EGK21055.1, YP_{—}003040254.1, NP_{—}708223.1, YP_{—}689824.1, ZP_{—}04625886.1, AEJ99232.1, ZP_{—}07135079.1, YP_{—}339488.1, ZP_{—}07247352.1, ZP_{—}07590743.1, ZP_{—}08303100.1, EFU96242.1, EFZ69715.1, YP_{—}001336370.1, YP_{—}001094550.1, ZP_{—}07679578.1, ZP_{—}06547779.1, EGI93593.1, YP_{—}003438264.1, YP_{—}003614165.1, YP_{—}408769.1, YP_{—}001881164.1, YP_{—}003655512.1, YP_{—}002237269.1, YP_{—}004116642.1, ZP_{—}03065203.1, ZP_{—}07951118.1, CAQ79951.1, AAZ26206.1, BAK12062.1, YP_{—}269853.2, NP_{—}930429.2, YP_{—}404102.1, ZP_{—}04620204.1, ZP_{—}08498986.1, YP_{—}001452041.1, ZP_{—}01159981.1, CAE15574.1, A1JK30.2, ZP_{—}04635573.1, ZP_{—}02904987.1, ZP_{—}02961182.1, YP_{—}001005598.1, ZP_{—}01301762.1, ZP_{—}06016509.1, CBY28037.1, ZP_{—}05060968.1, ZP_{—}04632512.1, YP_{—}002156637.1, YP_{—}002132807.1, Q5E3U1.2, YP_{—}205193.1, ZP_{—}04613435.1, ZP_{—}07380136.1, YP_{—}004299028.1, YP_{—}003334344.1, YP_{—}001610684.1, YP_{—}001720255.1, YP_{—}001400379.1, YP_{—}652007.1, NP_{—}668898.1, ZP_{—}04640314.1, ADV98116.1, ZP_{—}03840558.1, ZP_{—}07047543.1, ZP_{—}03320348.1, YP_{—}001681761.1, ZP_{—}04615169.1, ZP_{—}08182604.1, YP_{—}003520988.1, YP_{—}002151536.1, NP_{—}641653.1, ZP_{—}08188276.1, Q668V1.2, YP_{—}463621.1, ZP_{—}05032523.1, YP_{—}363100.1, YP_{—}002490860.1, YP_{—}071146.1, YP_{—}003527951.1, YP_{—}004615064.1, ZP_{—}06702935.1, YP_{—}003277339.1, ZP_{—}06729873.1, YP_{—}004552309.1, ZP_{—}08178119.1, YP_{—}558747.1, YP_{—}003059322.1, ZP_{—}04628689.1, ZP_{—}05043496.1, YP_{—}755774.1, NP_{—}106254.1, NP_{—}774461.1, YP_{—}004145058.1, NP_{—}636640.1, YP_{—}001411745.1 YP_{—}244043.1, YP_{—}003906899.1, ZP_{—}02151779.1, EFW54754.1, YP_{—}004147062.1, YP_{—}434583.1, ZP_{—}06862658.1, YP_{—}003559491.1, ZP_{—}07474361.1, ZP_{—}07478578.1, ZP_{—}03787298.1, ZP_{—}06840682.1, ZP_{—}05161835.1, ZP_{—}06794105.1, ZP_{—}05181908.1, ZP_{—}05174379.1, YP_{—}003883888.1, NP_{—}541475.1, NP_{—}949054.1, YP_{—}003931777.1, YP_{—}001993209.1, ZP_{—}06124668.1, YP_{—}001594738.1, ZP_{—}06070710.1, ZP_{—}06484372.1, YP_{—}002515449.1, YP_{—}001895558.1, YP_{—}002029364.1, ZP_{—}02891585.1, ZP_{—}04682672.1, YP_{—}003761433.1, YP_{—}004107983.1, YP_{—}223224.1, YP_{—}003812264.1, YP_{—}001622574.1, ZP_{—}05452320.1, YP_{—}002734532.1, YP_{—}001257739.1, YP_{—}001372564.1, ZP_{—}05137372.1, YP_{—}001973266.1, YP_{—}342869.1, NP_{—}699967.1, ZP_{—}05086267.1, ZP_{—}01736760.1, YP_{—}001914218.1, ZP_{—}05157647.1, YP_{—}485365.1, YP_{—}001926123.1, ZP_{—}05116437.1, ZP_{—}03544469.1, ZP_{—}08330383.1, ZP_{—}06491403.1, ZP_{—}01896167.1, ADP99705.1, ZP_{—}02883593.1, YP_{—}004228182.1, YP_{—}570677.1, ZP_{—}01225298.1, YP_{—}200487.1, YP_{—}002988196.1, ZP_{—}08269313.1, NP_{—}767800.1, YP_{—}001094989.1, ZP_{—}06065014.1, YP_{—}002981447.1, YP_{—}001260831.1, YP_{—}003817548.1, YP_{—}532099.1, ZP_{—}07676723.1, YP_{—}001242863.1, ZP_{—}02244047.1, YP_{—}982073.1, YP_{—}001899020.1, NP_{—}519880.1, ZP_{—}02379339.1, NP_{—}946171.1, ZP_{—}01615132.1, YP_{—}456953.1, ZP_{—}02168372.1, ZP_{—}08552434.1, CBJ37969.1, YP_{—}004418392.1, ZP_{—}02362492.1, YP_{—}004107339.1, YP_{—}001203133.1, ZP_{—}01546752.1, YP_{—}002974094.1, ZP_{—}02186892.1, YP_{—}001989920.1, YP_{—}002964466.1, ZP_{—}03265887.1, YP_{—}555553.1, CBA26305.1, ZP_{—}06728723.1, ZP_{—}07656835.1, ZP_{—}05620865.1, YP_{—}575713.1, YP_{—}001907090.1, YP_{—}002911224.1, YP_{—}047520.1, YP_{—}004688052.1,
in particular
EGH60623.1, NP_{—}744285.1, ZP_{—}04587907.1, EGH84450.1, YP_{—}609235.1, Q93Q12.1, ZP_{—}07263341.1, EGH10831.1, ZP_{—}08142928.1, YP_{—}004701152.1, ADR61111.1, EGH72107.1, ZP_{—}07255969.1, EGH76237.1, EGH66371.1, ZP_{—}07005687.1, YP_{—}001268914.1, ZP_{—}03397164.1, EGH45982.1, NP_{—}793297.1, YP_{—}236360.1, YP_{—}001667915.1, EGH29726.1, YP_{—}275370.1, ABP88736.1, ZP_{—}06458302.1, YP_{—}001748526.1, YP_{—}002871195.1, ZP_{—}06478839.1, EGH95845.1, EGH21541.1, ZP_{—}05638744.1, Q9AHY3.2, YP_{—}004352961.1, YP_{—}349607.1, YP_{—}259059.1, YP_{—}004713990.1, P28793.1, YP_{—}001172246.1, AEA83639.1, YP_{—}004474976.1, NP_{—}251704.1, ACP17923.1, YP_{—}004379416.1, YP_{—}001347517.1, ZP_{—}06877966.1, YP_{—}001187076.1, ZP_{—}01366482.1, ZP_{—}07774142.1, ZP_{—}06499586.1, YP_{—}791508.1, ZP_{—}07796310.1, NP_{—}250428.1, YP_{—}002441177.1, YP_{—}001348922.1, ZP_{—}06879352.1, AEA82038.1, YP_{—}001170648.1, YP_{—}004473370.1, YP_{—}004712521.1, YP_{—}004353314.1, ZP_{—}07164313.1, NP_{—}418288.1, YP_{—}003231641.1, AAA23750.1, ZP_{—}07192215.1, YP_{—}001460638.1, YP_{—}001727088.1, ZP_{—}08380619.1, ZP_{—}07136310.1, CAB40809.1, ZP_{—}07690617.1, ZP_{—}07103516.1, ZP_{—}03027888.1, ZP_{—}07121980.1, YP_{—}002414996.1, EGP22873.1, EGB59499.1, ZP_{—}07118761.1, YP_{—}002409078.1, YP_{—}002295407.1, EGE62412.1, EGB69560.1, ZP_{—}06655948.1, ZP_{—}06664574.1, ZP_{—}03070699.1, ZP_{—}07145404.1, ZP_{—}08376058.1, EGB85466.1, ZP_{—}07189176.1, ZP_{—}02999920.1, ZP_{—}08356523.1, ZP_{—}06659936.1, ZP_{—}07139396.1, YP_{—}001746178.1, ZP_{—}07098889.1, CBG37051.1, CBJ03626.1, ZP_{—}08366395.1, BAI57243.1, YP_{—}001465330.1, NP_{—}312801.1, EGC09628.1, EFW73050.1, ZP_{—}07221474.1, EGB39932.1, EFW72281.1, ZP_{—}07154547.1, YP_{—}002331616.1, EGB76756.1, EFZ75005.1, ZP_{—}07449248.1, NP_{—}756652.2, ZP_{—}04006347.1, NP_{—}290476.1, EGH36687.1, YP_{—}671920.1, ZP_{—}08350773.1, ZP_{—}07174622.1, CAP78309.1, ZP_{—}08361145.1, YP_{—}002400350.1, ZP_{—}08386169.1, EFU60028.1, YP_{—}859447.1, YP_{—}543379.2, ZP_{—}06937250.1, ZP_{—}06936670.1, YP_{—}001459147.1, ZP_{—}07196084.1, NP_{—}754768.1, ZP_{—}08384609.1, YP_{—}002408448.1, ZP_{—}07187886.1, ZP_{—}08374604.1, ZP_{—}07151809.1, ZP_{—}03035287.1, ZP_{—}08364768.1, YP_{—}002413389.1, ZP_{—}07448710.1, EGB63194.1, ZP_{—}08359459.1, YP_{—}002329984.1, YP_{—}001744544.1, CAP76837.1, EFZ73229.1, EFU57443.1, YP_{—}002398712.1, YP_{—}541623.1, ZP_{—}07144040.1, ZP_{—}08349090.1, CBG35413.1, ZP_{—}02773221.1, EGB40918.1, ZP_{—}03050715.1, ZP_{—}07787570.1, ZP_{—}08354786.1, YP_{—}002403607.1, AEE57458.1, ZP_{—}06658276.1, NP_{—}288914.1, YP_{—}002392166.1, ZP_{—}06654274.1, ZP_{—}07102361.1, EGB72544.1, ZP_{—}03027319.1, YP_{—}670274.1, ZP_{—}07097669.1, YP_{—}001463687.1, BAI55757.1, YP_{—}003500399.1, ZP_{—}07121648.1, YP_{—}002293925.1, ZP_{—}03003629.1, YP_{—}002387809.1, ZP_{—}03043524.1, YP_{—}001724305.1, ZP_{—}03068335.1, CBJ01980.1, AEJ57562.1, NP_{—}416843.1, ZP_{—}07135079.1, ZP_{—}07247352.1, ZP_{—}07590743.1, EFU96242.1, EFZ69715.1,
and particularly preferably
NP_{—}744285.1, YP_{—}004701152.1, ADR61111.1, YP_{—}001268914.1, YP_{—}001667915.1, ABP88736.1, YP_{—}001748526.1, Q9AHY3.2, YP_{—}004713990.1, YP_{—}001172246.1, AEA83639.1, AEA82038.1, YP_{—}001170648.1, YP_{—}004712521.1, YP_{—}002871195.1, YP_{—}349607.1, YP_{—}259059.1, ZP_{—}07774142.1, NP_{—}418288.1, NP_{—}416843.1, ZP_{—}07593201.1, ZP_{—}07590743.1,
and
proteins with a polypeptide sequence wherein up to 60%, preferably up to 25%, particularly preferably up to 15%, in particular up to 10, 9, 8, 7, 6, 5, 4, 3, 2 or 1% of the amino acid residues compared to the aforementioned reference sequences are modified by deletion, insertion, substitution or a combination thereof and which still possess at least 50%, preferably 65%, particularly preferably 80%, in particular more than 90% of the activity of the protein with the corresponding, aforementioned reference sequence, wherein 100% activity of the reference protein is understood to mean the increasing of the activity of the cells used as a biocatalyst, i.e. the quantity of substance converted per unit time based on the cell quantity used (units per gram cell dry weight [U/g CDW]) in comparison to the activity of the biocatalyst in the absence of the reference protein, wherein the activity in this connection and in connection with the determination of the activity of the enzyme E_{d} and Eₑ in general is understood to mean in particular the conversion of 2-dodecenoyl-CoA thioesters to 3-oxo-dodecanoyl-CoA thioesters.

### Specific Enzymes E_{f}

[0173] It is also preferable according to the invention that in the cells according to the invention the enzyme E_{f} is one which comprises sequences selected from:

YP_{—}026272.1, YP_{—}002389323.1, EGB30581.1, YP_{—}001460637.1, YP_{—}001727089.1, CAB40810.1, EGK16565.1, NP_{—}709649.1, YP_{—}001882545.1, ZP_{—}08356522.1, ZP_{—}06664573.1, AAA67642.1, ADA76222.1, EGK17812.1, YP_{—}405326.1, YP_{—}003236969.1, ZP_{—}06659935.1, YP_{—}410143.1, NP_{—}290475.1, ZP_{—}03027945.1, EFZ59092.1, YP_{—}002295406.1, CBG37050.1, EGP22872.1, EGE62411.1, EGC97040.1, ZP_{—}05435276.1, YP_{—}002400349.1, EGB59498.1, EFW54756.1, ZP_{—}08361144.1, YP_{—}001465329.1, YP_{—}002384701.1, YP_{—}002409079.1, ZP_{—}06655947.1, YP_{—}002414995.1, EGB69559.1, YP_{—}859446.1, EGC05061.1, ZP_{—}02904263.1, ZP_{—}08386168.1, YP_{—}543378.1, ZP_{—}08366394.1, ZP_{—}03066325.1, YP_{—}001746177.1, ZP_{—}07154548.1, ZP_{—}03070708.1, NP_{—}756651.1, YP_{—}312775.1, YP_{—}671919.1, YP_{—}002331615.1, YP_{—}003367348.1, ZP_{—}07449249.1, ZP_{—}04558440.1, ZP_{—}06354347.1, YP_{—}001451792.1, YP_{—}004732312.1, ZP_{—}06938722.1, NP_{—}457770.1, ZP_{—}02834646.1, ZP_{—}02658975.1, ZP_{—}03221210.1, EFY10008.1, YP_{—}001591070.1, YP_{—}218866.1, YP_{—}003943710.1, ZP_{—}03086141.1, ZP_{—}03163187.1, ZP_{—}08495783.1, EGE35936.1, YP_{—}003615423.1, YP_{—}002228261.1, YP_{—}002148907.1, ZP_{—}05970963.1, YP_{—}002241092.1, YP_{—}004591812.1, YP_{—}001178656.1, ZP_{—}08302761.1, YP_{—}002917175.1, YP_{—}001337974.1, Q9F0Y6.1, ZP_{—}06014072.1, YP_{—}001439748.1, YP_{—}003208639.1, 3GOA_A, YP_{—}003739634.1, ZP_{—}06192593.1, YP_{—}001906199.1, YP_{—}001476498.1, YP_{—}003019596.1, YP_{—}003261566.1, ZP_{—}03831341.1, ZP_{—}07380062.1, YP_{—}048334.1, YP_{—}003933022.1, ZP_{—}07953301.1, YP_{—}004114075.1, YP_{—}002647269.1, ADP11111.1, ZP_{—}03827988.1, ZP_{—}06638308.1, YP_{—}004214865.1, YP_{—}003518495.1, ZP_{—}04616541.1, BAK13440.1, CBX79036.1, YP_{—}003529580.1, ZP_{—}04628384.1, ZP_{—}04634365.1, ZP_{—}04641537.1, ZP_{—}04612254.1, ZP_{—}04637126.1, YP_{—}003331801.1, YP_{—}001004652.1, YP_{—}004296469.1, YP_{—}003006181.1, ZP_{—}04620755.1, YP_{—}003885046.1, ZP_{—}04624648.1, NP_{—}667801.1, EGI89588.1, YP_{—}128320.1, ZP_{—}01221705.1, YP_{—}002989324.1, ZP_{—}01236909.1, ZP_{—}01161146.1, ZP_{—}08310904.1, YP_{—}003713992.1, YP_{—}003466461.1, NP_{—}931576.1, YP_{—}003042703.1, ZP_{—}06050959.1, EGF42157.1, ZP_{—}00992844.1, YP_{—}002415748.1, ZP_{—}01065522.1, ZP_{—}05883432.1, ZP_{—}05879948.1, ZP_{—}06156528.1, ZP_{—}05927570.1, ZP_{—}07189177.1, YP_{—}004564871.1, ZP_{—}01870126.1, ZP_{—}02196042.1, YP_{—}003911299.1, ZP_{—}01815882.1, NP_{—}796408.1, YP_{—}004394587.1, ZP_{—}08518444.1, YP_{—}854675.1, ZP_{—}07742014.1, ZP_{—}01135243.1, YP_{—}002154795.1, NP_{—}759945.1, YP_{—}001143923.1, NP_{—}932821.1, Q5E8X7.2, ZP_{—}08568928.1, ZP_{—}06078671.1, ZP_{—}05718021.1, ZP_{—}01948567.1, YP_{—}203407.3, ZP_{—}04923725.1, ZP_{—}05719937.1, YP_{—}002309469.1, ZP_{—}06179384.1, ZP_{—}06048881.1, ZP_{—}01979851.1, ZP_{—}01262259.1, ZP_{—}01957951.1, ZP_{—}04405431.1, ZP_{—}08098152.1, ZP_{—}06034494.1, YP_{—}001758416.1, ZP_{—}04414293.1, ZP_{—}06040414.1, ZP_{—}01682043.1, NP_{—}232385.1, ZP_{—}05883854.1, YP_{—}002264298.1, ZP_{—}01987792.1, YP_{—}338567.1, ZP_{—}01900694.1, YP_{—}001672250.1, YP_{—}925913.1, YP_{—}001499881.1, ZP_{—}02158913.1, YP_{—}001471763.1, NP_{—}715662.1, YP_{—}748713.1, YP_{—}736078.1, ZP_{—}08568623.1, ZP_{—}02958885.2, YP_{—}004067125.1, ZP_{—}08409549.1, YP_{—}001181547.1, ADV52503.1, YP_{—}732156.1, YP_{—}001092150.1, YP_{—}003554800.1, YP_{—}001048425.1, YP_{—}961419.1, YP_{—}561034.1, ZP_{—}06125607.2, YP_{—}867674.1, YP_{—}001443701.1, ZP_{—}05943241.1, ZP_{—}05121169.1, ZP_{—}05974167.1, ZP_{—}03318463.1, ZP_{—}08620875.1, ZP_{—}01042073.1, YP_{—}154403.1, ZP_{—}04717155.1, ZP_{—}03805050.1, YP_{—}004468426.1, ZP_{—}03841336.1, YP_{—}002153225.1, YP_{—}004425807.1, ZP_{—}03351120.1, YP_{—}659788.1, YP_{—}004436298.1, YP_{—}267150.1, ZP_{—}06034790.1, YP_{—}003145205.1, ZP_{—}03561780.1, YP_{—}003810248.1, ZP_{—}05043383.1, YP_{—}693373.1, ZP_{—}01306166.1, YP_{—}004313956.1, YP_{—}790159.1, ZP_{—}06877967.1, NP_{—}251703.1, YP_{—}004482148.1, EGH66370.1, EGH10832.1, YP_{—}349606.1, YP_{—}236359.1, ZP_{—}07263340.1, EGH95844.1, ZP_{—}03368595.1, NP_{—}793296.1, ZP_{—}01165108.1, 1WDK_C, P28790.2, YP_{—}259060.1, ZP_{—}01074263.1, ZP_{—}04587908.1, EGH45981.1, ZP_{—}07774144.1, EGH84449.1, YP_{—}958424.1, YP_{—}275369.1, ZP_{—}07005686.1, YP_{—}001172247.1, YP_{—}004352962.1, ACP17922.1, YP_{—}002871196.1, YP_{—}435876.1, ZP_{—}01739262.1, YP_{—}003557880.1, ZP_{—}01892767.1, ZP_{—}08142929.1, ZP_{—}08462036.1, YP_{—}004701153.1, YP_{—}001667916.1, YP_{—}001280989.1, YP_{—}001268913.1, Q93Q11.1, ZP_{—}05619304.1, AEA79634.1, Q9R9W0.1, NP_{—}744286.1, YP_{—}001187077.1, YP_{—}609234.1, ADP97277.1, YP_{—}045110.1, YP_{—}004379417.1, YP_{—}003626259.1, ZP_{—}06692405.1, ZP_{—}06063436.1, YP_{—}003733839.1, EGE12166.1, ZP_{—}05824703.1, EGE26385.1, EGE13530.1, YP_{—}004474975.1, YP_{—}001708315.1, EGE16076.1, ZP_{—}06726496.1, ZP_{—}06067276.1, ZP_{—}06058513.1, ZP_{—}06068412.1, ZP_{—}06157093.1, ZP_{—}03822267.1, A3M1H9.2, YP_{—}001340442.1, ZP_{—}05362446.1, ABP88737.1, ZP_{—}01219813.1, ZP_{—}08638730.1, YP_{—}265215.1, YP_{—}581487.1, YP_{—}003896828.1, YP_{—}002798636.1, ZP_{—}01678475.1, ZP_{—}05946075.1, YP_{—}527080.1, ZP_{—}08554005.1, ZP_{—}03360083.1, YP_{—}574438.1, YP_{—}003073152.1, YP_{—}001083375.1, ZP_{—}08648989.1, YP_{—}001982171.1, ZP_{—}05096741.1, ZP_{—}03336985.1, ZP_{—}01103277.1, ZP_{—}07136312.1, ZP_{—}08328590.1, ZP_{—}05128805.1, EGH76239.1, ZP_{—}03377529.1, CBA71811.1, EFZ47010.1, ZP_{—}03377530.1, ZP_{—}07136311.1, EFZ47009.1, EGH29725.1, YP_{—}003022611.1, YP_{—}002138248.1, ZP_{—}01462439.1, ZP_{—}06499584.1, YP_{—}004669687.1, YP_{—}633289.1, ZP_{—}01907074.1, YP_{—}001611010.1, ADI22030.1, ZP_{—}03026937.1, YP_{—}580525.1, YP_{—}003265025.1, YP_{—}001525888.1, YP_{—}002298157.1, YP_{—}002945338.1, YP_{—}003271056.1, YP_{—}004198848.1, ZP_{—}01895445.1, ZP_{—}08636846.1, ADP95813.1, ZP_{—}03357270.1, YP_{—}002535575.1, YP_{—}160280.1, YP_{—}385012.1, YP_{—}004154467.1, YP_{—}742957.1, YP_{—}984918.1, ZP_{—}07949467.1, YP_{—}002552054.1, YP_{—}003439807.1, YP_{—}002919224.1, YP_{—}001475439.1, ZP_{—}07652842.1, YP_{—}001335140.1, YP_{—}972400.1, ZP_{—}08308052.1, YP_{—}001749490.1, YP_{—}004594280.1, ZP_{—}05360584.1, YP_{—}002490812.1, ZP_{—}03336986.1, YP_{—}004236457.1, ZP_{—}08387650.1, YP_{—}046370.1, ZP_{—}03823670.1, AEJ97944.1, ZP_{—}06188204.1, ABF82237.1, ZP_{—}06016043.1, YP_{—}046135.1, YP_{—}942111.1, ZP_{—}01614052.1, YP_{—}001341942.1, YP_{—}004713534.1, ZP_{—}01460231.1, YP_{—}001630800.1, YP_{—}001264278.1, CAD76924.1, ZP_{—}07200324.1, YP_{—}550745.1, YP_{—}001413963.1, YP_{—}002132758.1, ZP_{—}05972210.1, ZP_{—}06065848.1, ZP_{—}08209169.1, ZP_{—}06061642.1, ZP_{—}05109438.1, YP_{—}001419321.1, YP_{—}463572.1, YP_{—}608369.1, YP_{—}001683323.1, AEA83130.1, YP_{—}001230361.1, YP_{—}001832875.1, YP_{—}002237684.1, AAN39378.1, YP_{—}001019613.1, YP_{—}426398.1, ZP_{—}03543802.1, YP_{—}001171793.1, YP_{—}002138936.1, YP_{—}001562369.1, ZP_{—}01786296.1, YP_{—}001528043.1, NP_{—}881363.1, ZP_{—}04625099.1, ZP_{—}02187462.1, YP_{—}002355162.1, YP_{—}248479.1, ZP_{—}07043392.1, YP_{—}002028041.1, YP_{—}001900023.1, ZP_{—}01792340.1, ZP_{—}03541158.1, NP_{—}438930.1, ZP_{—}04464778.1, YP_{—}003278968.1, YP_{—}004490499.1, ZP_{—}07662038.1, AAM48101.1, YP_{—}422117.1, YP_{—}524752.1, YP_{—}918568.1, YP_{—}001264814.1, YP_{—}003807823.1, YP_{—}001260276.1, ZP_{—}07046088.1, ZP_{—}01784141.1, ZP_{—}05135853.1, YP_{—}002982015.1, EEZ80724.1, YP_{—}001292714.1, YP_{—}001971860.1, YP_{—}788379.1, ZP_{—}05783989.1, YP_{—}004415862.1, CAE45106.1, YP_{—}004618019.1, ZP_{—}01126529.1, ZP_{—}06062289.1, YP_{—}004538662.1, NP_{—}248919.1, YP_{—}001098905.1, YP_{—}003847633.1, YP_{—}002432816.1, YP_{—}003280245.1, A64092, ZP_{—}08404839.1, YP_{—}003466069.1, YP_{—}001348923.1, YP_{—}158582.1, YP_{—}004229600.1, ZP_{—}07797976.1, YP_{—}001416028.1, YP_{—}001747677.1, YP_{—}002362051.1, YP_{—}931973.1, ZP_{—}08505255.1, EGP53986.1, NP_{—}250427.1, YP_{—}366806.1, ZP_{—}04638299.1, ZP_{—}08485306.1, YP_{—}001675166.1, AAA23322.1, NP_{—}927515.1, AAR83740.1, YP_{—}433439.1, YP_{—}001668851.1, YP_{—}001713606.1, YP_{—}002354475.1, ZP_{—}06548530.1, ZP_{—}04764695.1, ZP_{—}01910282.1, YP_{—}004146469.1, YP_{—}095382.1, ZP_{—}06495825.1, YP_{—}003777379.1, ZP_{—}01914912.1, ZP_{—}06895226.1, YP_{—}004379898.1, YP_{—}003365234.1, YP_{—}001784146.1, YP_{—}003021900.1, YP_{—}004555586.1, YP_{—}001101071.1, CBW99592.1, YP_{—}003254723.1, AAG30258.1, YP_{—}004536011.1, NP_{—}884797.1, NP_{—}635761.1, YP_{—}002429235.1, YP_{—}001901798.1, ZP_{—}06485970.1, YP_{—}123631.1, YP_{—}001352245.1, ZP_{—}03697428.1, ZP_{—}05824476.1, ZP_{—}01014491.1, EGH60624.1, YP_{—}004028852.1, ZP_{—}04633718.1, YP_{—}001846659.1, ZP_{—}04933402.1, YP_{—}003731942.1, YP_{—}001345710.1, YP_{—}003979747.1, ZP_{—}00053266.1, YP_{—}126656.1, YP_{—}003442067.1, YP_{—}585810.1, ZP_{—}01614053.1, ZP_{—}06690229.1, YP_{—}001858908.1, ZP_{—}01128624.1, NP_{—}888558.1, ZP_{—}05827098.1, Q8VPF1.1, YP_{—}004473788.1, EGH77345.1, P45363.1, EGH44350.1, YP_{—}001676522.1, ZP_{—}05824514.1, ZP_{—}06487592.1, ZP_{—}02887415.1, ZP_{—}04761513.1, YP_{—}003377502.1, YP_{—}001188713.1, ZP_{—}01167911.1, ZP_{—}06690267.1, YP_{—}004680403.1, YP_{—}003731982.1, YP_{—}002800937.1, YP_{—}001758618.1, YP_{—}004380648.1, YP_{—}001188079.1, YP_{—}001707349.1, YP_{—}004687867.1, CAZ89607.1, ZP_{—}05827058.1, ZP_{—}08142248.1, YP_{—}195739.1, YP_{—}004703691.1, YP_{—}001354779.1, ZP_{—}08627639.1, ZP_{—}04936650.1, NP_{—}642338.1, ZP_{—}03451105.1, YP_{—}001713567.1, EFV87627.1, YP_{—}728366.1, YP_{—}002912837.1, YP_{—}001707333.1, YP_{—}363794.1, YP_{—}003524466.1, YP_{—}959751.1, YP_{—}606872.1, YP_{—}102034.1, YP_{—}002942733.1, YP_{—}002238110.1, ZP_{—}05032457.1, YP_{—}001846620.1, YP_{—}004153168.1, ZP_{—}02462362.1, YP_{—}003777513.1, YP_{—}199120.1, ZP_{—}08179077.1, ZP_{—}08188845.1, YP_{—}107279.1, ADP98459.1, YP_{—}004157409.1, YP_{—}610092.1, EGP55478.1, CBJ37328.1, ZP_{—}08181461.1, ZP_{—}06842278.1, ZP_{—}06703672.1, ADR61907.1, ZP_{—}06688595.1, ZP_{—}04934614.1, ZP_{—}07262554.1, YP_{—}786611.1, YP_{—}003439146.1, YP_{—}003592852.1, YP_{—}001747891.1, YP_{—}004386570.1, Q51956.1, YP_{—}004593695.1, YP_{—}560516.1, ZP_{—}06731844.1, YP_{—}001897101.1, ZP_{—}08388430.1, YP_{—}001166210.1, YP_{—}557015.1, ZP_{—}06843809.1, EGP42659.1, YP_{—}002005592.1, YP_{—}002871766.1, YP_{—}555845.1, ZP_{—}05921114.1, NP_{—}746745.1, NP_{—}637343.1, ZP_{—}02243308.1, YP_{—}001267798.1, ZP_{—}02354510.1, NP_{—}841567.1, ZP_{—}08177693.1, YP_{—}004703877.1, YP_{—}001166143.1, EGH73771.1, ZP_{—}06489206.1, ZP_{—}01892079.1, YP_{—}934562.1, ADY81955.1, EGB73439.1, NP_{—}520373.1, YP_{—}003905682.1, EGH61062.1, YP_{—}001894311.1, ZP_{—}02245330.1, YP_{—}918778.1, YP_{—}001120651.1, YP_{—}003612896.1, YP_{—}004125334.1, ZP_{—}07952596.1, YP_{—}001479268.1, ZP_{—}07043083.1, YP_{—}003644271.1, NP_{—}421210.1, ZP_{—}02882590.1, EGP25245.1, YP_{—}233920.1, EGD00226.1, YP_{—}004418315.1, ADY81914.1, ZP_{—}04944762.1, YP_{—}003603999.1, YP_{—}001060552.1, ZP_{—}03026966.1, YP_{—}441123.1, YP_{—}201177.1, ZP_{—}05117283.1, YP_{—}004232360.1, YP_{—}002802211.1, YP_{—}106085.1, YP_{—}258448.1, YP_{—}001989549.1, NP_{—}945866.1, ZP_{—}03573123.1, YP_{—}283604.1, YP_{—}004702122.1, ZP_{—}03398400.1, YP_{—}105310.1, YP_{—}001479310.1, CAC41637.1, ZP_{—}02372747.1, YP_{—}001578772.1, ZP_{—}08181762.1, ZP_{—}00439074.2, ADX92638.1, ZP_{—}03790444.1, YP_{—}110295.1, YP_{—}002439726.1, YP_{—}004361986.1, ZP_{—}04946665.1, YP_{—}003751825.1, YP_{—}001061488.1, ZP_{—}03545148.1, ZP_{—}01767462.1, ZP_{—}01769818.1, YP_{—}990241.1, YP_{—}002382777.1, YP_{—}002898389.1, YP_{—}003452421.1, EGH66881.1, CBW26817.1, YP_{—}004352451.1, EGC07165.1, YP_{—}003982691.1, ZP_{—}02906520.1, YP_{—}410799.1, YP_{—}001189077.1, YP_{—}004226900.1, ADP96997.1, YP_{—}237079.1, YP_{—}002946310.1, YP_{—}004029037.1, NP_{—}745423.1, ZP_{—}08139209.1, YP_{—}004294989.1, NP_{—}251630.1, EGH73592.1, ZP_{—}04934925.1, ZP_{—}03583227.1, ZP_{—}03584241.1, YP_{—}004684330.1, YP_{—}004501533.1, YP_{—}001186637.1, YP_{—}003980170.1, AEJ98540.1, YP_{—}004688333.1, YP_{—}003276725.1, EGH11975.1, YP_{—}276147.1, YP_{—}790233.1, ZP_{—}01736635.1, YP_{—}002440908.1, YP_{—}002230040.1, YP_{—}724980.1, YP_{—}004231717.1, ZP_{—}01226775.1, ZP_{—}03454556.1, ZP_{—}05586076.1, ZP_{—}02890239.1, YP_{—}001172996.1, ZP_{—}02377875.1, ZP_{—}07202399.1, YP_{—}774661.1, YP_{—}440314.2, YP_{—}443408.1, ZP_{—}06878044.1, ZP_{—}08274339.1, YP_{—}001618203.1, ZP_{—}08631485.1, ZP_{—}01545529.1, ZP_{—}03267843.1, ZP_{—}07797009.1, YP_{—}003376084.1, EGH21143.1, YP_{—}003753513.1, YP_{—}004282234.1, YP_{—}726356.1, ZP_{—}06014951.1, YP_{—}109637.1, ZP_{—}06461447.1, YP_{—}001795795.1, YP_{—}621981.1, ZP_{—}07794257.1, ZP_{—}05060451.1, YP_{—}002919830.1, YP_{—}001796645.1, NP_{—}794063.1, ZP_{—}01365347.1, YP_{—}003610065.1, YP_{—}001462757.1, YP_{—}001807185.1, ZP_{—}04928407.1, YP_{—}002229986.1, ZP_{—}02883901.1, YP_{—}370284.1, ZP_{—}05053491.1, AAC24332.1, ZP_{—}04929241.1, ZP_{—}00943679.1, YP_{—}001766064.1, YP_{—}001670661.1, YP_{—}003296167.1, YP_{—}003773673.1, NP_{—}250691.1, ZP_{—}05823066.1, YP_{—}004381309.1, YP_{—}004714773.1, YP_{—}746962.1, YP_{—}002513585.1, YP_{—}294674.1, YP_{—}004593822.1, YP_{—}622032.1, YP_{—}001897940.1, YP_{—}001335713.1, YP_{—}001856626.1, YP_{—}791238.1, YP_{—}004140309.1, YP_{—}001269802.1, ZP_{—}06879064.1, ZP_{—}01736318.1, ZP_{—}02886139.1, ZP_{—}04941413.1, YP_{—}001670851.1, YP_{—}371023.1, YP_{—}002980343.1, YP_{—}002795605.1, ZP_{—}06069679.1, ZP_{—}02463309.1, ZP_{—}05785212.1, YP_{—}001793049.1, YP_{—}003965283.1, YP_{—}001233153.1, YP_{—}299776.1, ZP_{—}06498740.1, AEJ99148.1, YP_{—}004685690.1, YP_{—}003746771.1, YP_{—}004381943.1, YP_{—}004378973.1, YP_{—}004314684.1, EGH79619.1, ZP_{—}04882546.1, YP_{—}347001.1, YP_{—}347471.1, YP_{—}001757758.1, YP_{—}002911324.1, NP_{—}518596.1, ZP_{—}00948908.1, YP_{—}442777.1, YP_{—}002874183.1, YP_{—}002230989.1, YP_{—}004360850.1, ABC36127.1, YP_{—}004696127.1, YP_{—}002799527.1, YP_{—}001631275.1, YP_{—}626125.1, ZP_{—}05090649.1, ZP_{—}07774002.1, ZP_{—}04940525.1, AEK60371.1, ADR60119.1, YP_{—}102981.1, YP_{—}003451423.1, NP_{—}743536.1, CAA45255.1,
in particular
YP_{—}790159.1, ZP_{—}06877967.1, NP_{—}251703.1, EGH66370.1, EGH10832.1, YP_{—}349606.1, YP_{—}236359.1, ZP_{—}07263340.1, EGH95844.1, NP_{—}793296.1, 1WDK_C, P28790.2, YP_{—}259060.1, ZP_{—}04587908.1, EGH45981.1, ZP_{—}07774144.1, EGH84449.1, YP_{—}275369.1, ZP_{—}07005686.1, YP_{—}001172247.1, YP_{—}004352962.1, ACP17922.1, YP_{—}002871196.1, ZP_{—}08142929.1, YP_{—}004701153.1, YP_{—}001667916.1, YP_{—}001268913.1, Q93Q11.1, Q9R9W0.1, NP_{—}744286.1, YP_{—}001187077.1, YP_{—}609234.1, YP_{—}004379417.1, YP_{—}004474975.1, ABP88737.1, EGH76239.1, EGH29725.1, ZP_{—}06499584.1, YP_{—}001749490.1, ABF82237.1, YP_{—}004713534.1, CAD76924.1, YP_{—}608369.1, AEA83130.1, YP_{—}001171793.1, YP_{—}788379.1, CAE45106.1, NP_{—}248919.1, YP_{—}001348923.1, ZP_{—}07797976.1, YP_{—}001747677.1, NP_{—}250427.1, AAR83740.1, YP_{—}001668851.1, ZP_{—}06495825.1, YP_{—}004379898.1, EGH60624.1, ZP_{—}04933402.1, YP_{—}001345710.1, Q8VPF1.1, YP_{—}004473788.1, EGH77345.1, EGH44350.1, YP_{—}001188713.1, YP_{—}004380648.1, YP_{—}001188079.1, ZP_{—}08142248.1, YP_{—}004703691.1, ZP_{—}04936650.1, YP_{—}606872.1, YP_{—}610092.1, ADR61907.1, ZP_{—}04934614.1, ZP_{—}07262554.1, YP_{—}001747891.1, Q51956.1, YP_{—}002871766.1, NP_{—}746745.1, YP_{—}001267798.1, YP_{—}004703877.1, EGH73771.1, EGH61062.1, YP_{—}233920.1, YP_{—}258448.1, YP_{—}004702122.1, ZP_{—}03398400.1, YP_{—}002439726.1, EGH66881.1, YP_{—}004352451.1, YP_{—}001189077.1, YP_{—}237079.1, NP_{—}745423.1, ZP_{—}08139209.1, NP_{—}251630.1, EGH73592.1, ZP_{—}04934925.1, YP_{—}001186637.1, EGH11975.1, YP_{—}276147.1, YP_{—}790233.1, YP_{—}002440908.1, YP_{—}001172996.1, ZP_{—}06878044.1, ZP_{—}07797009.1, EGH21143.1, ZP_{—}06461447.1, ZP_{—}07794257.1, NP_{—}794063.1, ZP_{—}01365347.1, ZP_{—}04928407.1, AAC24332.1, ZP_{—}04929241.1, YP_{—}001670661.1, NP_{—}250691.1, YP_{—}004381309.1, YP_{—}004714773.1, YP_{—}791238.1, YP_{—}001269802.1, ZP_{—}06879064.1, YP_{—}001670851.1, ZP_{—}06498740.1, YP_{—}004381943.1, YP_{—}004378973.1, EGH79619.1, YP_{—}347001.1, YP_{—}347471.1, YP_{—}002874183.1, ZP_{—}07774002.1, ADR60119.1, NP_{—}743536.1, YP_{—}001269653.1, ZP_{—}06482365.1, ADI95330.1, ZP_{—}07003619.1, BAB96553.1, ZP_{—}07777009.1, ABA10831.1, YP_{—}273131.1, YP_{—}259428.1, EFW86233.1, EGH85840.1, ZP_{—}07774597.1, EGH54613.1, YP_{—}004353129.1, YP_{—}002871014.1, YP_{—}001171232.1, EGH67454.1, EFW82139.1, ZP_{—}04590526.1, EGH58132.1, EGH06629.1, EGH99157.1, ZP_{—}05638078.1, NP_{—}790796.1, AEE59172.1, YP_{—}026272.1, YP_{—}002389323.1, EGB30581.1, YP_{—}001460637.1, YP_{—}001727089.1, CAB40810.1, ZP_{—}03049054.1, ZP_{—}08356522.1, ZP_{—}06664573.1, AAA67642.1, YP_{—}003236969.1, ZP_{—}06659935.1, NP_{—}290475.1, ZP_{—}03027945.1, EFZ59092.1, YP_{—}002295406.1, CBG37050.1, EGP22872.1, EGE62411.1, YP_{—}002400349.1, EGB59498.1, ZP_{—}08361144.1, YP_{—}001465329.1, YP_{—}002409079.1, ZP_{—}06655947.1, YP_{—}002414995.1, EGB69559.1, YP_{—}859446.1, ZP_{—}08386168.1, YP_{—}543378.1, ZP_{—}08366394.1, YP_{—}001746177.1, ZP_{—}07154548.1, ZP_{—}03070708.1, NP_{—}756651.1, YP_{—}671919.1, YP_{—}002331615.1, ZP_{—}07449249.1, ZP_{—}06938722.1, ZP_{—}03086141.1, ZP_{—}07189177.1, ZP_{—}07136312.1, EFZ47010.1, ZP_{—}07136311.1, EFZ47009.1, ZP_{—}03026937.1, EGB73439.1, EGP25245.1, ZP_{—}03026966.1, YP_{—}001462757.1, CAP76727.1, YP_{—}670163.1,
and particularly preferably
YP_{—}026272.1, AAA67642.1, ZP_{—}07593202.1, YP_{—}004701153.1, YP_{—}001667916.1, YP_{—}001268913.1, Q9R9W0.1, NP_{—}744286.1, ABP88737.1, YP_{—}001749490.1, YP_{—}001747677.1, YP_{—}001668851.1, YP_{—}004703691.1, ADR61907.1, YP_{—}001747891.1, Q51956.1, NP_{—}746745.1, YP_{—}001267798.1, YP_{—}004703877.1, YP_{—}004702122.1, NP_{—}745423.1, AAC24332.1, YP_{—}001670661.1, YP_{—}001269802.1, YP_{—}001670851.1, ADR60119.1, NP_{—}743536.1, YP_{—}001269653.1, ADI95330.1, BAB96553.1, YP_{—}001172247.1, YP_{—}004713534.1, AEA83130.1, YP_{—}001171793.1, YP_{—}001172996.1, YP_{—}004714773.1, YP_{—}001171232.1, YP_{—}349606.1, YP_{—}259060.1, ZP_{—}07774144.1, YP_{—}002871196.1, ABF82237.1, YP_{—}002871766.1, YP_{—}258448.1, YP_{—}347001.1, YP_{—}347471.1, YP_{—}002874183.1, ZP_{—}07774002.1, ZP_{—}07777009.1, YP_{—}259428.1, ZP_{—}07774597.1, YP_{—}002871014.1,
and
proteins with a polypeptide sequence wherein up to 60%, preferably up to 25%, particularly preferably up to 15%, in particular up to 10, 9, 8, 7, 6, 5, 4, 3, 2 or 1% of the amino acid residues compared to the aforementioned reference sequences are modified by deletion, insertion, substitution or a combination thereof and which still possess at least 50%, preferably 65%, particularly preferably 80%, in particular more than 90% of the activity of the protein with the corresponding, aforementioned reference sequence, wherein 100% activity of the reference protein is understood to mean the increasing of the activity of the cells used as a biocatalyst, i.e. the quantity of substance converted per unit time based on the cell quantity used (units per gram cell dry weight [U/g CDW]) in comparison to the activity of the biocatalyst in the absence of the reference protein, wherein the activity in this connection and in connection with the determination of the activity of the enzyme E_{f} in general is understood to mean in particular the conversion of 3-oxo-dodecanoyl-CoA thioesters and CoA to decanoyl-CoA thioesters and acetyl-CoA.

### Sixth Genetic Modification for Intensification of the Acyl-ACP Thioester Synthesis

[0174] According to the invention, the microorganisms have a sixth genetic modification, so that compared to their wild type they are capable of forming more acyl-ACP thioester from at least one simple carbon source. An overview of correspondingly desirable genetic modifications is to be found in FIG. 1 of WO2008119082, paragraph 1 (Fatty Acid Production Increase/Product Production Increase).

[0175] This has the technical effect that formation of carboxylic acids and carboxylate ester intensified by the first genetic modification, but also of ω-functionalized carboxylic acids and carboxylate esters formed in greater quantity through the second, third, fourth, fifth or seventh genetic modification, is still further intensified.

[0176] Thus configured organisms preferred according to the invention are also outstandingly suitable for the production of compounds which are selected from

α,ω-alkanediols, α,ω-alkanedialdehydes, α-oxo-ω-hydroxyalkanes and α,ω-alkanediamines, since compounds of these classes are produced in significant quantities together with ω-functionalized alkanoic acids and ω-functionalized alkanoate esters
Seventh Genetic Modification for the Production of ω-Functionalized Carboxylic Acids and Co-Functionalized Carboxylate Esters with a Terminal Double Bond

[0177] The microorganisms according to the invention can additionally be configured such that they are advantageously suitable for the production of ω-functionalized carboxylic acids and ω-functionalized carboxylate esters with a terminal double bond. For this, preferred microorganisms contain a seventh genetic modification which comprises, compared to the enzymatic activity of the wild type of the microorganism, increased activity of an enzyme Eₓᵢ which catalyses the conversion of ω-carboxycarboxylic acids or ω-carboxycarboxylate esters to carboxylic acids or carboxylate esters with a terminal double bond, selected from the group Eₓᵢ) Cytochrome P450 fatty acid decarboxylase, which catalyses the conversion of an alkanoic acid with n carbon atoms to a corresponding terminal olefin with n−1 carbon atoms, in particular of dodecanoic acid to undec-10-enoic acid.

[0178] Microorganisms preferred according to the invention are those which are obtained when the microorganisms listed below having a seventh genetic modification in the sense of the invention are used as the starting point, in that they are provided with a first and second genetic modification and optionally at least one further genetic modification in the sense of the invention.

[0179] WO2009085278 A1 describes, particularly in paragraphs [0033] to [0048], [0056] to [0063] and [0188] to [0202], FIG. 10, table 8, practical examples 5 to 18 and claims 28 to 51 and 188 to 195, microorganisms preferred according to the invention which have a seventh genetic modification, so that compared to their wild type they are capable of forming more fatty acids and fatty acid derivatives, in particular olefins, from at least one simple carbon source. The document also describes Eₓᵢ preferred according to the invention enzymes and the sequences thereof, particularly in paragraphs [0021] to [0032], [0051] to [0055], [0081] to [0084] and [0160] to [0183], table 8, practical examples 5 to 18, claims 1 to 25 and FIGS. 3, 7 and 9.

### Specific Embodiments of Preferable Microorganisms and Enzymes

[0180] According to the invention, microorganisms are particularly preferably selected from those which have

a first and a second genetic modification in the sense of the invention,
a first, a second and a fifth genetic modification in the sense of the invention,
a first, a second and a third genetic modification in the sense of the invention,
a first, a second, a third and a fifth genetic modification in the sense of the invention,
a first, a second and a fourth genetic modification in the sense of the invention,
a first, a second, a fourth and a fifth genetic modification in the sense of the invention,
a first, a second, a third and a fourth genetic modification in the sense of the invention,
a first, a second, a third, a fourth and a fifth genetic modification in the sense of the invention,
a first, a second and a seventh genetic modification in the sense of the invention,
a first, a second, a fifth and a seventh genetic modification in the sense of the invention,
a first, a second, a third and a seventh genetic modification in the sense of the invention or
a first, a second, a third, a fifth and a seventh genetic modification in the sense of the invention
a first, a second and a sixth genetic modification in the sense of the invention,
a first, a second, a fifth and a sixth genetic modification in the sense of the invention,
a first, a second, a third and a sixth genetic modification in the sense of the invention,
a first, a second, a third, a fifth and a sixth genetic modification in the sense of the invention,
a first, a second, a fourth and a sixth genetic modification in the sense of the invention,
a first, a second, a fourth, a fifth and a sixth genetic modification in the sense of the invention,
a first, a second, a third, a fourth and a sixth genetic modification in the sense of the invention,
a first, a second, a third, a fourth, a fifth and a sixth genetic modification in the sense of the invention,
a first, a second, a sixth and a seventh genetic modification in the sense of the invention,
a first, a second, a fifth, a sixth and a seventh genetic modification in the sense of the invention,
a first, a second, a third, a sixth and a seventh genetic modification in the sense of the invention or
a first, a second, a third, a fifth, sixth and a seventh genetic modification in the sense of the invention.

[0181] According to the invention, microorganisms are particularly preferable which have a first genetic modification, so that compared to their wild type they are capable of forming more carboxylic acids and carboxylate ester from at least one simple carbon source, wherein the first genetic modification displays, compared to the enzymatic activity of the wild type of the microorganism, increased activity of at least one of the enzymes Eᵢ or of one of the enzymes with a polypeptide sequence wherein up to 60%, preferably up to 25%, particularly preferably up to 15%, in particular up to 10, 9, 8, 7, 6, 5, 4, 3, 2 or 1% amino acid residues compared to the sequences stated in the following table by reference are modified by deletion, insertion, substitution or a combination thereof and which still possess at least 50%, preferably 65%, particularly preferably 80%, in particular more than 90% of the activity of the protein with the respective reference sequence, wherein 100% activity of the reference protein is understood to mean the increasing of the activity of the cells used as a biocatalyst, i.e. the quantity of substance converted per unit time based on the cell quantity used (units per gram cell dry weight [U/g CDW]) in comparison to the activity of the biocatalyst in the absence of the reference protein, wherein the activity in this connection in general is understood to mean in particular the hydrolysis of an ACP thioester with the carbon chain length assigned in the following table to the individual enzymes Eᵢ, and the carboxylic acid and carboxylate ester have a carbon chain length of the carboxylic acid part, as shown in the following table:

| Enzyme Eᵢ selected from | Carbon chain length |
|---|---|
| AAC49269.1, CAB60830.1, AAC49179.1, | C8 |
| AAC49784.1, ABB71579.1, CAC19934.1 | |
| and SEQ ID Nos. 26, 29, 33, 38, 40, 97 and | |
| 99 of WO2011008565 | |
| AAC49269.1, CAB60830.1, AAC49179.1, | C10 |
| AAC49784.1, ABB71579.1, CAC19934.1 | |
| and SEQ ID Nos. 73, 75, 87 and 89 of | |
| WO2011008565. | |
| Q41635.1, Q39473.1, AAC49180.1, | C12 |
| CAC19934.1, AAC72881.1, AAC49783.1, | |
| AAC49784.1 and SEQ ID Nos. 49 and 51 of | |
| WO2011008565. | |
| Q41635.1, Q39473.1, AAC49180.1, | C14 |
| CAC19934.1, AAC72881.1 AAC49783.1, | |
| AAC49784.1 and SEQ ID Nos. 49, 51, 53, | |
| 55, 61, 63, 67, 69, 77, 79, 83 and 85 of | |
| WO2011008565. | |

[0182] The aforementioned deletions of amino acid residues compared to the sequences stated in the above table by reference relate in particular to deletions at the N- and/or C-terminus, in particular at the N-Terminus. Particularly preferably, the aforementioned N-terminus is that of a plant plastid targeting sequence. Such plant plastid targeting sequences can for example be predicted by means of the algorithms utilized by the predictive tool TargetP 1.1 (www.cbs.dtu.dk/servicesiTargetP/) and described in the following publications, preferably without use of cutoffs:

Predicting Subcellular Localization of Proteins Based on their N-Terminal Amino Acid Sequence.

[0183] Olof Emanuelsson, Henrik Nielsen, Soren Brunak and Gunnar von Heijne.

[0184] J. Mol. Biol., 300: 1005-1016, 2000 and Identification of prokaryotic and eukaryotic signal peptides and prediction of their cleavage sites. Henrik Nielsen, Jacob Engelbrecht, Soren Brunak and Gunnar von Heijne. Protein Engineering, 10:1-6, 1997.

[0185] Microorganisms quite especially preferred according to the invention (abbreviated as MO) are outstandingly suitable for the production of ω-aminocarboxylic acids and have increased or decreased enzyme activities (abbreviated as E) described in the following table, where these can in addition advantageously be combined with an increased enzyme activity compared to the wild type of the microorganism, which is described for the 3-ketoacyl-ACP (Acyl Carrrier Protein) synthase III (EC 2.3.1.41), in particular that from plants, preferably that from plants the seeds whereof contain fatty acids with alkyl residues shorter than 14 C atoms, and particularly preferably that from plants of the genera Cuphea, Elaeis, Cocos, Umbellularia and Cinnamomum and gene products selected from AccA, AccB, AccC, AccD, AceE, AceF, Lpd, AcpP, FabA, FabB, FabD, FabF, FabG, FabH, Fabl, FabZ, PanD, PanK, UdhA, PntA or PntB. Any combinations of at least two of these enzyme activities can advantageously be increased.

[0186] In addition, moreover, it can be advantageous if the microorganism is provided with a lower enzyme activity compared to the wild type of the microorganism, which is described for the gene products selected from TdcE, PflA, PflB, PflC, PflD, PoxB, YgfG, AckA, AckB, TdcD, Pta, LdhA, AdhE, MgsA, FdnG, FdnH, FdnI, FdhF, FdoG, FdoH, FdoI, PrpC, PrpD, PrpF, PrpB, TdcD, Pdc, PorA, PorB, PorC, PorD, AlsS, IlvB, IlvM, IlvN, IlvG, IlyI, IlvH, AlsD, ButB, Thl, ThlA, ThlB, PhaA, PhaB, Crt, BdhA, BdhB, Adc, Adh, CtfB, AtoA, AtoD, LdhL, GltA, FabR, FhuA, Dld, LldA or LldP, singly or in any combination.

| | | |
|---|---|---|
| MO | E increased | E decreased |

| | | | | |
|---|---|---|---|---|
| 1 | E₁ₐE₂ | | | |
| 2 | E_{1b}E₂ | | | |
| 3 | E₁ₐE₂E₃ | | | |
| 4 | E_{1b}E₂E₃ | | | |
| 5 | E₁ₐE₂Eᵢ | | | |
| 6 | E_{1b}E₂Eᵢ | | | |
| 7 | E₁ₐE₂Eᵢᵢ | | | |
| 8 | E_{1b}E₂Eᵢᵢ | | | |
| 9 | E₁ₐE₂EᵢᵢE_{iib} | | | |
| 10 | E_{1b}E₂EᵢᵢE_{iib} | | | |
| 11 | E₁ₐE₂E₃Eᵢ | | | |
| 12 | E_{1b}E₂E₃Eᵢ | | | |
| 13 | E₁ₐE₂E₃Eᵢᵢ | | | |
| 14 | E_{1b}E₂E₃Eᵢᵢ | | | |
| 15 | E₁ₐE₂E₃EᵢᵢE_{iib} | | | |
| 16 | E_{1b}E₂E₃EᵢᵢE_{iib} | | | |
| 17 | E₁ₐE₂E₄ | | | |
| 18 | E_{1b}E₂E₄ | | | |
| 19 | E₁ₐE₂E₃E₄ | | | |
| 20 | E_{1b}E₂E₃E₄ | | | |
| 21 | E₁ₐE₂EᵢE₄ | | | |
| 22 | E_{1b}E₂EᵢE₄ | | | |
| 23 | E₁ₐE₂EᵢᵢE₄ | | | |
| 24 | E_{1b}E₂EᵢᵢE₄ | | | |
| 25 | E₁ₐE₂EᵢᵢE_{iib}E₄ | | | |
| 26 | E_{1b}E₂EᵢᵢE_{iib}E₄ | | | |
| 27 | E₁ₐE₂E₃EᵢE₄ | | | |
| 28 | E_{1b}E₂E₃EᵢE₄ | | | |
| 29 | E₁ₐE₂E₃EᵢᵢE₄ | | | |
| 30 | E_{1b}E₂E₃EᵢᵢE₄ | | | |
| 31 | E₁ₐE₂E₃EᵢᵢE_{iib}E₄ | | | |
| 32 | E_{1b}E₂E₃EᵢᵢE_{iib}E₄ | | | |
| 33 | E₁ₐE₂Eᵢᵢᵢ | | | |
| 34 | E_{1b}E₂Eᵢᵢᵢ | | | |
| 35 | E₁ₐE₂E₃Eᵢᵢᵢ | | | |
| 36 | E_{1b}E₂E₃Eᵢᵢᵢ | | | |
| 37 | E₁ₐE₂EᵢᵢᵢE₄ | | | |
| 38 | E_{1b}E₂EᵢᵢᵢE₄ | | | |
| 39 | E₁ₐE₂E₃EᵢᵢᵢE₄ | | | |
| 40 | E_{1b}E₂E₃EᵢᵢᵢE₄ | | | |
| 41 | E₁ₐE₂Eᵢᵥ | | | |
| 42 | E_{1b}E₂Eᵢᵥ | | | |
| 43 | E₁ₐE₂E₃Eᵢᵥ | | | |
| 44 | E_{1b}E₂E₃Eᵢᵥ | | | |
| 45 | E₁ₐE₂EᵢᵥE₄ | | | |
| 46 | E_{1b}E₂EᵢᵥE₄ | | | |
| 47 | E₁ₐE₂E₃EᵢᵥE₄ | | | |
| 48 | E_{1b}E₂E₃EᵢᵥE₄ | | | |
| 49 | E₁ₐE₂ | | E₄* | |
| 50 | E_{1b}E₂ | | E₄* | |
| 51 | E₁ₐE₂E₃ | | E₄* | |
| 52 | E_{1b}E₂E₃ | | E₄* | |
| 53 | E₁ₐE₂Eᵢ | | E₄* | |
| 54 | E_{1b}E₂Eᵢ | | E₄* | |
| 55 | E₁ₐE₂Eᵢᵢ | | E₄* | |
| 56 | E_{1b}E₂Eᵢᵢ | | E₄* | |
| 57 | E₁ₐE₂EᵢᵢE_{iib} | | E₄* | |
| 58 | E_{1b}E₂EᵢᵢE_{iib} | | E₄* | |
| 59 | E₁ₐE₂E₃Eᵢ | | E₄* | |
| 60 | E_{1b}E₂E₃Eᵢ | | E₄* | |
| 61 | E₁ₐE₂E₃Eᵢᵢ | | E₄* | |
| 62 | E_{1b}E₂E₃Eᵢᵢ | | E₄* | |
| 63 | E₁ₐE₂E₃EᵢᵢE_{iib} | | E₄* | |
| 64 | E_{1b}E₂E₃EᵢᵢE_{iib} | | E₄* | |
| 65 | E₁ₐE₂E₄ | | E₄* | |
| 66 | E_{1b}E₂E₄ | | E₄* | |
| 67 | E₁ₐE₂E₃E₄ | | E₄* | |
| 68 | E_{1b}E₂E₃E₄ | | E₄* | |
| 69 | E₁ₐE₂EᵢE₄ | | E₄* | |
| 70 | E_{1b}E₂EᵢE₄ | | E₄* | |
| 71 | E₁ₐE₂EᵢᵢE₄ | | E₄* | |
| 72 | E_{1b}E₂EᵢᵢE₄ | | E₄* | |
| 73 | E₁ₐE₂EᵢᵢE_{iib}E₄ | | E₄* | |
| 74 | E_{1b}E₂EᵢᵢE_{iib}E₄ | | E₄* | |
| 75 | E₁ₐE₂E₃EᵢE₄ | | E₄* | |
| 76 | E_{1b}E₂E₃EᵢE₄ | | E₄* | |
| 77 | E₁ₐE₂E₃EᵢᵢE₄ | | E₄* | |
| 78 | E_{1b}E₂E₃EᵢᵢE₄ | | E₄* | |
| 79 | E₁ₐE₂E₃EᵢᵢE_{iib}E₄ | | E₄* | |
| 80 | E_{1b}E₂E₃EᵢᵢE_{iib}E₄ | | E₄* | |
| 81 | E₁ₐE₂Eᵢᵢᵢ | | E₄* | |
| 82 | E_{1b}E₂Eᵢᵢᵢ | | E₄* | |
| 83 | E₁ₐE₂E₃Eᵢᵢᵢ | | E₄* | |
| 84 | E_{1b}E₂E₃Eᵢᵢᵢ | | E₄* | |
| 85 | E₁ₐE₂EᵢᵢᵢE₄ | | E₄* | |
| 86 | E_{1b}E₂EᵢᵢᵢE₄ | | E₄* | |
| 87 | E₁ₐE₂E₃EᵢᵢᵢE₄ | | E₄* | |
| 88 | E_{1b}E₂E₃EᵢᵢᵢE₄ | | E₄* | |
| 89 | E₁ₐE₂Eᵢᵥ | | E₄* | |
| 90 | E_{1b}E₂Eᵢᵥ | | E₄* | |
| 91 | E₁ₐE₂E₃Eᵢᵥ | | E₄* | |
| 92 | E_{1b}E₂E₃Eᵢᵥ | | E₄* | |
| 93 | E₁ₐE₂EᵢᵥE₄ | | E₄* | |
| 94 | E_{1b}E₂EᵢᵥE₄ | | E₄* | |
| 95 | E₁ₐE₂E₃EᵢᵥE₄ | | E₄* | |
| 96 | E_{1b}E₂E₃EᵢᵥE₄ | | E₄* | |
| 97 | E₁ₐE₂ | | E₅ | |
| 98 | E_{1b}E₂ | | E₅ | |
| 99 | E₁ₐE₂E₃ | | E₅ | |
| 100 | E_{1b}E₂E₃ | | E₅ | |
| 101 | E₁ₐE₂Eᵢ | | E₅ | |
| 102 | E_{1b}E₂Eᵢ | | E₅ | |
| 103 | E₁ₐE₂Eᵢᵢ | | E₅ | |
| 104 | E_{1b}E₂Eᵢᵢ | | E₅ | |
| 105 | E₁ₐE₂EᵢᵢE_{iib} | | E₅ | |
| 106 | E_{1b}E₂EᵢᵢE_{iib} | | E₅ | |
| 107 | E₁ₐE₂E₃Eᵢ | | E₅ | |
| 108 | E_{1b}E₂E₃Eᵢ | | E₅ | |
| 109 | E₁ₐE₂E₃Eᵢᵢ | | E₅ | |
| 110 | E_{1b}E₂E₃Eᵢᵢ | | E₅ | |
| 111 | E₁ₐE₂E₃EᵢᵢE_{iib} | | E₅ | |
| 112 | E_{1b}E₂E₃EᵢᵢE_{iib} | | E₅ | |
| 113 | E₁ₐE₂E₄ | | E₅ | |
| 114 | E_{1b}E₂E₄ | | E₅ | |
| 115 | E₁ₐE₂E₃E₄ | | E₅ | |
| 116 | E_{1b}E₂E₃E₄ | | E₅ | |
| 117 | E₁ₐE₂EᵢE₄ | | E₅ | |
| 118 | E_{1b}E₂EᵢE₄ | | E₅ | |
| 119 | E₁ₐE₂EᵢᵢE₄ | | E₅ | |
| 120 | E_{1b}E₂EᵢᵢE₄ | | E₅ | |
| 121 | E₁ₐE₂EᵢᵢE_{iib}E₄ | | E₅ | |
| 122 | E_{1b}E₂EᵢᵢE_{iib}E₄ | | E₅ | |
| 123 | E₁ₐE₂E₃EᵢE₄ | | E₅ | |
| 124 | E_{1b}E₂E₃EᵢE₄ | | E₅ | |
| 125 | E₁ₐE₂E₃EᵢᵢE₄ | | E₅ | |
| 126 | E_{1b}E₂E₃EᵢᵢE₄ | | E₅ | |
| 127 | E₁ₐE₂E₃EᵢᵢE_{iib}E₄ | | E₅ | |
| 128 | E_{1b}E₂E₃EᵢᵢE_{iib}E₄ | | E₅ | |
| 129 | E₁ₐE₂Eᵢᵢᵢ | | E₅ | |
| 130 | E_{1b}E₂Eᵢᵢᵢ | | E₅ | |
| 131 | E₁ₐE₂E₃Eᵢᵢᵢ | | E₅ | |
| 132 | E_{1b}E₂E₃Eᵢᵢᵢ | | E₅ | |
| 133 | E₁ₐE₂EᵢᵢᵢE₄ | | E₅ | |
| 134 | E_{1b}E₂EᵢᵢᵢE₄ | | E₅ | |
| 135 | E₁ₐE₂E₃EᵢᵢᵢE₄ | | E₅ | |
| 136 | E_{1b}E₂E₃EᵢᵢᵢE₄ | | E₅ | |
| 137 | E₁ₐE₂Eᵢᵥ | | E₅ | |
| 138 | E_{1b}E₂Eᵢᵥ | | E₅ | |
| 139 | E₁ₐE₂E₃Eᵢᵥ | | E₅ | |
| 140 | E_{1b}E₂E₃Eᵢᵥ | | E₅ | |
| 141 | E₁ₐE₂EᵢᵥE₄ | | E₅ | |
| 142 | E_{1b}E₂EᵢᵥE₄ | | E₅ | |
| 143 | E₁ₐE₂E₃EᵢᵥE₄ | | E₅ | |
| 144 | E_{1b}E₂E₃EᵢᵥE₄ | | E₅ | |
| 145 | E₁ₐE₂ | | E₄*E₅ | |
| 146 | E_{1b}E₂ | | E₄*E₅ | |
| 147 | E₁ₐE₂E₃ | | E₄*E₅ | |
| 148 | E_{1b}E₂E₃ | | E₄*E₅ | |
| 149 | E₁ₐE₂Eᵢ | | E₄*E₅ | |
| 150 | E_{1b}E₂Eᵢ | | E₄*E₅ | |
| 151 | E₁ₐE₂Eᵢᵢ | | E₄*E₅ | |
| 152 | E_{1b}E₂Eᵢᵢ | | E₄*E₅ | |
| 153 | E₁ₐE₂EᵢᵢE_{iib} | | E₄*E₅ | |
| 154 | E_{1b}E₂EᵢᵢE_{iib} | | E₄*E₅ | |
| 155 | E₁ₐE₂E₃Eᵢ | | E₄*E₅ | |
| 156 | E_{1b}E₂E₃Eᵢ | | E₄*E₅ | |
| 157 | E₁ₐE₂E₃Eᵢᵢ | | E₄*E₅ | |
| 158 | E_{1b}E₂E₃Eᵢᵢ | | E₄*E₅ | |
| 159 | E₁ₐE₂E₃EᵢᵢE_{iib} | | E₄*E₅ | |
| 160 | E_{1b}E₂E₃EᵢᵢE_{iib} | | E₄*E₅ | |
| 161 | E₁ₐE₂E₄ | | E₄*E₅ | |
| 162 | E_{1b}E₂E₄ | | E₄*E₅ | |
| 163 | E₁ₐE₂E₃E₄ | | E₄*E₅ | |
| 164 | E_{1b}E₂E₃E₄ | | E₄*E₅ | |
| 165 | E₁ₐE₂EᵢE₄ | | E₄*E₅ | |
| 166 | E_{1b}E₂EᵢE₄ | | E₄*E₅ | |
| 167 | E₁ₐE₂EᵢᵢE₄ | | E₄*E₅ | |
| 168 | E_{1b}E₂EᵢᵢE₄ | | E₄*E₅ | |
| 169 | E₁ₐE₂EᵢᵢE_{iib}E₄ | | E₄*E₅ | |
| 170 | E_{1b}E₂EᵢᵢE_{iib}E₄ | | E₄*E₅ | |
| 171 | E₁ₐE₂E₃EᵢE₄ | | E₄*E₅ | |
| 172 | E_{1b}E₂E₃EᵢE₄ | | E₄*E₅ | |
| 173 | E₁ₐE₂E₃EᵢᵢE₄ | | E₄*E₅ | |
| 174 | E_{1b}E₂E₃EᵢᵢE₄ | | E₄*E₅ | |
| 175 | E₁ₐE₂E₃EᵢᵢE_{iib}E₄ | | E₄*E₅ | |
| 176 | E_{1b}E₂E₃EᵢᵢE_{iib}E₄ | | E₄*E₅ | |
| 177 | E₁ₐE₂Eᵢᵢᵢ | | E₄*E₅ | |
| 178 | E_{1b}E₂Eᵢᵢᵢ | | E₄*E₅ | |
| 179 | E₁ₐE₂E₃Eᵢᵢᵢ | | E₄*E₅ | |
| 180 | E_{1b}E₂E₃Eᵢᵢᵢ | | E₄*E₅ | |
| 181 | E₁ₐE₂EᵢᵢᵢE₄ | | E₄*E₅ | |
| 182 | E_{1b}E₂EᵢᵢᵢE₄ | | E₄*E₅ | |
| 183 | E₁ₐE₂E₃EᵢᵢᵢE₄ | | E₄*E₅ | |
| 184 | E_{1b}E₂E₃EᵢᵢᵢE₄ | | E₄*E₅ | |
| 185 | E₁ₐE₂Eᵢᵥ | | E₄*E₅ | |
| 186 | E_{1b}E₂Eᵢᵥ | | E₄*E₅ | |
| 187 | E₁ₐE₂E₃Eᵢᵥ | | E₄*E₅ | |
| 188 | E_{1b}E₂E₃Eᵢᵥ | | E₄*E₅ | |
| 189 | E₁ₐE₂EᵢᵥE₄ | | E₄*E₅ | |
| 190 | E_{1b}E₂EᵢᵥE₄ | | E₄*E₅ | |
| 191 | E₁ₐE₂E₃EᵢᵥE₄ | | E₄*E₅ | |
| 192 | E_{1b}E₂E₃EᵢᵥE₄ | | E₄*E₅ | |
| 193 | E₁ₐE₂ | AlkL | | |
| 194 | E_{1b}E₂ | AlkL | | |
| 195 | E₁ₐE₂E₃ | AlkL | | |
| 196 | E_{1b}E₂E₃ | AlkL | | |
| 197 | E₁ₐE₂Eᵢ | AlkL | | |
| 198 | E_{1b}E₂Eᵢ | AlkL | | |
| 199 | E₁ₐE₂Eᵢᵢ | AlkL | | |
| 200 | E_{1b}E₂Eᵢᵢ | AlkL | | |
| 201 | E₁ₐE₂EᵢᵢE_{iib} | AlkL | | |
| 202 | E_{1b}E₂EᵢᵢE_{iib} | AlkL | | |
| 203 | E₁ₐE₂E₃Eᵢ | AlkL | | |
| 204 | E_{1b}E₂E₃Eᵢ | AlkL | | |
| 205 | E₁ₐE₂E₃Eᵢᵢ | AlkL | | |
| 206 | E_{1b}E₂E₃Eᵢᵢ | AlkL | | |
| 207 | E₁ₐE₂E₃EᵢᵢE_{iib} | AlkL | | |
| 208 | E_{1b}E₂E₃EᵢᵢE_{iib} | AlkL | | |
| 209 | E₁ₐE₂E₄ | AlkL | | |
| 210 | E_{1b}E₂E₄ | AlkL | | |
| 211 | E₁ₐE₂E₃E₄ | AlkL | | |
| 212 | E_{1b}E₂E₃E₄ | AlkL | | |
| 213 | E₁ₐE₂EᵢE₄ | AlkL | | |
| 214 | E_{1b}E₂EᵢE₄ | AlkL | | |
| 215 | E₁ₐE₂EᵢᵢE₄ | AlkL | | |
| 216 | E_{1b}E₂EᵢᵢE₄ | AlkL | | |
| 217 | E₁ₐE₂EᵢᵢE_{iib}E₄ | AlkL | | |
| 218 | E_{1b}E₂EᵢᵢE_{iib}E₄ | AlkL | | |
| 219 | E₁ₐE₂E₃EᵢE₄ | AlkL | | |
| 220 | E_{1b}E₂E₃EᵢE₄ | AlkL | | |
| 221 | E₁ₐE₂E₃EᵢᵢE₄ | AlkL | | |
| 222 | E_{1b}E₂E₃EᵢᵢE₄ | AlkL | | |
| 223 | E₁ₐE₂E₃EᵢᵢE_{iib}E₄ | AlkL | | |
| 224 | E_{1b}E₂E₃EᵢᵢE_{iib}E₄ | AlkL | | |
| 225 | E₁ₐE₂Eᵢᵢᵢ | AlkL | | |
| 226 | E_{1b}E₂Eᵢᵢᵢ | AlkL | | |
| 227 | E₁ₐE₂E₃Eᵢᵢᵢ | AlkL | | |
| 228 | E_{1b}E₂E₃Eᵢᵢᵢ | AlkL | | |
| 229 | E₁ₐE₂EᵢᵢᵢE₄ | AlkL | | |
| 230 | E_{1b}E₂EᵢᵢᵢE₄ | AlkL | | |
| 231 | E₁ₐE₂E₃EᵢᵢᵢE₄ | AlkL | | |
| 232 | E_{1b}E₂E₃EᵢᵢᵢE₄ | AlkL | | |
| 233 | E₁ₐE₂Eᵢᵥ | AlkL | | |
| 234 | E_{1b}E₂Eᵢᵥ | AlkL | | |
| 235 | E₁ₐE₂E₃Eᵢᵥ | AlkL | | |
| 236 | E_{1b}E₂E₃Eᵢᵥ | AlkL | | |
| 237 | E₁ₐE₂EᵢᵥE₄ | AlkL | | |
| 238 | E_{1b}E₂EᵢᵥE₄ | AlkL | | |
| 239 | E₁ₐE₂E₃EᵢᵥE₄ | AlkL | | |
| 240 | E_{1b}E₂E₃EᵢᵥE₄ | AlkL | | |
| 241 | E₁ₐE₂ | AlkL | E₄* | |
| 242 | E_{1b}E₂ | AlkL | E₄* | |
| 243 | E₁ₐE₂E₃ | AlkL | E₄* | |
| 244 | E_{1b}E₂E₃ | AlkL | E₄* | |
| 245 | E₁ₐE₂Eᵢ | AlkL | E₄* | |
| 246 | E_{1b}E₂Eᵢ | AlkL | E₄* | |
| 247 | E₁ₐE₂Eᵢᵢ | AlkL | E₄* | |
| 248 | E_{1b}E₂Eᵢᵢ | AlkL | E₄* | |
| 249 | E₁ₐE₂EᵢᵢE_{iib} | AlkL | E₄* | |
| 250 | E_{1b}E₂EᵢᵢE_{iib} | AlkL | E₄* | |
| 251 | E₁ₐE₂E₃Eᵢ | AlkL | E₄* | |
| 252 | E_{1b}E₂E₃Eᵢ | AlkL | E₄* | |
| 253 | E₁ₐE₂E₃Eᵢᵢ | AlkL | E₄* | |
| 254 | E_{1b}E₂E₃Eᵢᵢ | AlkL | E₄* | |
| 255 | E₁ₐE₂E₃EᵢᵢE_{iib} | AlkL | E₄* | |
| 256 | E_{1b}E₂E₃EᵢᵢE_{iib} | AlkL | E₄* | |
| 257 | E₁ₐE₂E₄ | AlkL | E₄* | |
| 258 | E_{1b}E₂E₄ | AlkL | E₄* | |
| 259 | E₁ₐE₂E₃E₄ | AlkL | E₄* | |
| 260 | E_{1b}E₂E₃E₄ | AlkL | E₄* | |
| 261 | E₁ₐE₂EᵢE₄ | AlkL | E₄* | |
| 262 | E_{1b}E₂EᵢE₄ | AlkL | E₄* | |
| 263 | E₁ₐE₂EᵢᵢE₄ | AlkL | E₄* | |
| 264 | E_{1b}E₂EᵢᵢE₄ | AlkL | E₄* | |
| 265 | E₁ₐE₂EᵢᵢE_{iib}E₄ | AlkL | E₄* | |
| 266 | E_{1b}E₂EᵢᵢE_{iib}E₄ | AlkL | E₄* | |
| 267 | E₁ₐE₂E₃EᵢE₄ | AlkL | E₄* | |
| 268 | E_{1b}E₂E₃EᵢE₄ | AlkL | E₄* | |
| 269 | E₁ₐE₂E₃EᵢᵢE₄ | AlkL | E₄* | |
| 270 | E_{1b}E₂E₃EᵢᵢE₄ | AlkL | E₄* | |
| 271 | E₁ₐE₂E₃EᵢᵢE_{iib}E₄ | AlkL | E₄* | |
| 272 | E_{1b}E₂E₃EᵢᵢE_{iib}E₄ | AlkL | E₄* | |
| 273 | E₁ₐE₂Eᵢᵢᵢ | AlkL | E₄* | |
| 274 | E_{1b}E₂Eᵢᵢᵢ | AlkL | E₄* | |
| 275 | E₁ₐE₂E₃Eᵢᵢᵢ | AlkL | E₄* | |
| 276 | E_{1b}E₂E₃Eᵢᵢᵢ | AlkL | E₄* | |
| 277 | E₁ₐE₂EᵢᵢᵢE₄ | AlkL | E₄* | |
| 278 | E_{1b}E₂EᵢᵢᵢE₄ | AlkL | E₄* | |
| 279 | E₁ₐE₂E₃EᵢᵢᵢE₄ | AlkL | E₄* | |
| 280 | E_{1b}E₂E₃EᵢᵢᵢE₄ | AlkL | E₄* | |
| 281 | E₁ₐE₂Eᵢᵥ | AlkL | E₄* | |
| 282 | E_{1b}E₂Eᵢᵥ | AlkL | E₄* | |
| 283 | E₁ₐE₂E₃Eᵢᵥ | AlkL | E₄* | |
| 284 | E_{1b}E₂E₃Eᵢᵥ | AlkL | E₄* | |
| 285 | E₁ₐE₂EᵢᵥE₄ | AlkL | E₄* | |
| 286 | E_{1b}E₂EᵢᵥE₄ | AlkL | E₄* | |
| 287 | E₁ₐE₂E₃EᵢᵥE₄ | AlkL | E₄* | |
| 288 | E_{1b}E₂E₃EᵢᵥE₄ | AlkL | E₄* | |
| 289 | E₁ₐE₂ | AlkL | E₅ | |
| 290 | E_{1b}E₂ | AlkL | E₅ | |
| 291 | E₁ₐE₂E₃ | AlkL | E₅ | |
| 292 | E_{1b}E₂E₃ | AlkL | E₅ | |
| 293 | E₁ₐE₂Eᵢ | AlkL | E₅ | |
| 294 | E_{1b}E₂Eᵢ | AlkL | E₅ | |
| 295 | E₁ₐE₂Eᵢᵢ | AlkL | E₅ | |
| 296 | E_{1b}E₂Eᵢᵢ | AlkL | E₅ | |
| 297 | E₁ₐE₂EᵢᵢE_{iib} | AlkL | E₅ | |
| 298 | E_{1b}E₂EᵢᵢE_{iib} | AlkL | E₅ | |
| 299 | E₁ₐE₂E₃Eᵢ | AlkL | E₅ | |
| 300 | E_{1b}E₂E₃Eᵢ | AlkL | E₅ | |
| 301 | E₁ₐE₂E₃Eᵢᵢ | AlkL | E₅ | |
| 302 | E_{1b}E₂E₃Eᵢᵢ | AlkL | E₅ | |
| 303 | E₁ₐE₂E₃EᵢᵢE_{iib} | AlkL | E₅ | |
| 304 | E_{1b}E₂E₃EᵢᵢE_{iib} | AlkL | E₅ | |
| 305 | E₁ₐE₂E₄ | AlkL | E₅ | |
| 306 | E_{1b}E₂E₄ | AlkL | E₅ | |
| 307 | E₁ₐE₂E₃E₄ | AlkL | E₅ | |
| 308 | E_{1b}E₂E₃E₄ | AlkL | E₅ | |
| 309 | E₁ₐE₂EᵢE₄ | AlkL | E₅ | |
| 310 | E_{1b}E₂EᵢE₄ | AlkL | E₅ | |
| 311 | E₁ₐE₂EᵢᵢE₄ | AlkL | E₅ | |
| 312 | E_{1b}E₂EᵢᵢE₄ | AlkL | E₅ | |
| 313 | E₁ₐE₂EᵢᵢE_{iib}E₄ | AlkL | E₅ | |
| 314 | E_{1b}E₂EᵢᵢE_{iib}E₄ | AlkL | E₅ | |
| 315 | E₁ₐE₂E₃EᵢE₄ | AlkL | E₅ | |
| 316 | E_{1b}E₂E₃EᵢE₄ | AlkL | E₅ | |
| 317 | E₁ₐE₂E₃EᵢᵢE₄ | AlkL | E₅ | |
| 318 | E_{1b}E₂E₃EᵢᵢE₄ | AlkL | E₅ | |
| 319 | E₁ₐE₂E₃EᵢᵢE_{iib}E₄ | AlkL | E₅ | |
| 320 | E_{1b}E₂E₃EᵢᵢE_{iib}E₄ | AlkL | E₅ | |
| 321 | E₁ₐE₂Eᵢᵢᵢ | AlkL | E₅ | |
| 322 | E_{1b}E₂Eᵢᵢᵢ | AlkL | E₅ | |
| 323 | E₁ₐE₂E₃Eᵢᵢᵢ | AlkL | E₅ | |
| 324 | E_{1b}E₂E₃Eᵢᵢᵢ | AlkL | E₅ | |
| 325 | E₁ₐE₂EᵢᵢᵢE₄ | AlkL | E₅ | |
| 326 | E_{1b}E₂EᵢᵢᵢE₄ | AlkL | E₅ | |
| 327 | E₁ₐE₂E₃EᵢᵢᵢE₄ | AlkL | E₅ | |
| 328 | E_{1b}E₂E₃EᵢᵢᵢE₄ | AlkL | E₅ | |
| 329 | E₁ₐE₂Eᵢᵥ | AlkL | E₅ | |
| 330 | E_{1b}E₂Eᵢᵥ | AlkL | E₅ | |
| 331 | E₁ₐE₂E₃Eᵢᵥ | AlkL | E₅ | |
| 332 | E_{1b}E₂E₃Eᵢᵥ | AlkL | E₅ | |
| 333 | E₁ₐE₂EᵢᵥE₄ | AlkL | E₅ | |
| 334 | E_{1b}E₂EᵢᵥE₄ | AlkL | E₅ | |
| 335 | E₁ₐE₂E₃EᵢᵥE₄ | AlkL | E₅ | |
| 336 | E_{1b}E₂E₃EᵢᵥE₄ | AlkL | E₅ | |
| 337 | E₁ₐE₂ | AlkL | E₄*E₅ | |
| 338 | E_{1b}E₂ | AlkL | E₄*E₅ | |
| 339 | E₁ₐE₂E₃ | AlkL | E₄*E₅ | |
| 340 | E_{1b}E₂E₃ | AlkL | E₄*E₅ | |
| 341 | E₁ₐE₂Eᵢ | AlkL | E₄*E₅ | |
| 342 | E_{1b}E₂Eᵢ | AlkL | E₄*E₅ | |
| 343 | E₁ₐE₂Eᵢᵢ | AlkL | E₄*E₅ | |
| 344 | E_{1b}E₂Eᵢᵢ | AlkL | E₄*E₅ | |
| 345 | E₁ₐE₂EᵢᵢE_{iib} | AlkL | E₄*E₅ | |
| 346 | E_{1b}E₂EᵢᵢE_{iib} | AlkL | E₄*E₅ | |
| 347 | E₁ₐE₂E₃Eᵢ | AlkL | E₄*E₅ | |
| 348 | E_{1b}E₂E₃Eᵢ | AlkL | E₄*E₅ | |
| 349 | E₁ₐE₂E₃Eᵢᵢ | AlkL | E₄*E₅ | |
| 350 | E_{1b}E₂E₃Eᵢᵢ | AlkL | E₄*E₅ | |
| 351 | E₁ₐE₂E₃EᵢᵢE_{iib} | AlkL | E₄*E₅ | |
| 352 | E_{1b}E₂E₃EᵢᵢE_{iib} | AlkL | E₄*E₅ | |
| 353 | E₁ₐE₂E₄ | AlkL | E₄*E₅ | |
| 354 | E_{1b}E₂E₄ | AlkL | E₄*E₅ | |
| 355 | E₁ₐE₂E₃E₄ | AlkL | E₄*E₅ | |
| 356 | E_{1b}E₂E₃E₄ | AlkL | E₄*E₅ | |
| 357 | E₁ₐE₂EᵢE₄ | AlkL | E₄*E₅ | |
| 358 | E_{1b}E₂EᵢE₄ | AlkL | E₄*E₅ | |
| 359 | E₁ₐE₂EᵢᵢE₄ | AlkL | E₄*E₅ | |
| 360 | E_{1b}E₂EᵢᵢE₄ | AlkL | E₄*E₅ | |
| 361 | E₁ₐE₂EᵢᵢE_{iib}E₄ | AlkL | E₄*E₅ | |
| 362 | E_{1b}E₂EᵢᵢE_{iib}E₄ | AlkL | E₄*E₅ | |
| 363 | E₁ₐE₂E₃EᵢE₄ | AlkL | E₄*E₅ | |
| 364 | E_{1b}E₂E₃EᵢE₄ | AlkL | E₄*E₅ | |
| 365 | E₁ₐE₂E₃EᵢᵢE₄ | AlkL | E₄*E₅ | |
| 366 | E_{1b}E₂E₃EᵢᵢE₄ | AlkL | E₄*E₅ | |
| 367 | E₁ₐE₂E₃EᵢᵢE_{iib}E₄ | AlkL | E₄*E₅ | |
| 368 | E_{1b}E₂E₃EᵢᵢE_{iib}E₄ | AlkL | E₄*E₅ | |
| 369 | E₁ₐE₂Eᵢᵢᵢ | AlkL | E₄*E₅ | |
| 370 | E_{1b}E₂Eᵢᵢᵢ | AlkL | E₄*E₅ | |
| 371 | E₁ₐE₂E₃Eᵢᵢᵢ | AlkL | E₄*E₅ | |
| 372 | E_{1b}E₂E₃Eᵢᵢᵢ | AlkL | E₄*E₅ | |
| 373 | E₁ₐE₂EᵢᵢᵢE₄ | AlkL | E₄*E₅ | |
| 374 | E_{1b}E₂EᵢᵢᵢE₄ | AlkL | E₄*E₅ | |
| 375 | E₁ₐE₂E₃EᵢᵢᵢE₄ | AlkL | E₄*E₅ | |
| 376 | E_{1b}E₂E₃EᵢᵢᵢE₄ | AlkL | E₄*E₅ | |
| 377 | E₁ₐE₂Eᵢᵥ | AlkL | E₄*E₅ | |
| 378 | E_{1b}E₂Eᵢᵥ | AlkL | E₄*E₅ | |
| 379 | E₁ₐE₂E₃Eᵢᵥ | AlkL | E₄*E₅ | |
| 380 | E_{1b}E₂E₃Eᵢᵥ | AlkL | E₄*E₅ | |
| 381 | E₁ₐE₂EᵢᵥE₄ | AlkL | E₄*E₅ | |
| 382 | E_{1b}E₂EᵢᵥE₄ | AlkL | E₄*E₅ | |
| 383 | E₁ₐE₂E₃EᵢᵥE₄ | AlkL | E₄*E₅ | |
| 384 | E_{1b}E₂E₃EᵢᵥE₄ | AlkL | E₄*E₅ | |
| 385 | E₁ₐE₂ | | | Eₐ |
| 386 | E_{1b}E₂ | | | Eₐ |
| 387 | E₁ₐE₂E₃ | | | Eₐ |
| 388 | E_{1b}E₂E₃ | | | Eₐ |
| 389 | E₁ₐE₂Eᵢ | | | Eₐ |
| 390 | E_{1b}E₂Eᵢ | | | Eₐ |
| 391 | E₁ₐE₂Eᵢᵢ | | | Eₐ |
| 392 | E_{1b}E₂Eᵢᵢ | | | Eₐ |
| 393 | E₁ₐE₂EᵢᵢE_{iib} | | | Eₐ |
| 394 | E_{1b}E₂EᵢᵢE_{iib} | | | Eₐ |
| 395 | E₁ₐE₂E₃Eᵢ | | | Eₐ |
| 396 | E_{1b}E₂E₃Eᵢ | | | Eₐ |
| 397 | E₁ₐE₂E₃Eᵢᵢ | | | Eₐ |
| 398 | E_{1b}E₂E₃Eᵢᵢ | | | Eₐ |
| 399 | E₁ₐE₂E₃EᵢᵢE_{iib} | | | Eₐ |
| 400 | E_{1b}E₂E₃EᵢᵢE_{iib} | | | Eₐ |
| 401 | E₁ₐE₂E₄ | | | Eₐ |
| 402 | E_{1b}E₂E₄ | | | Eₐ |
| 403 | E₁ₐE₂E₃E₄ | | | Eₐ |
| 404 | E_{1b}E₂E₃E₄ | | | Eₐ |
| 405 | E₁ₐE₂EᵢE₄ | | | Eₐ |
| 406 | E_{1b}E₂EᵢE₄ | | | Eₐ |
| 407 | E₁ₐE₂EᵢᵢE₄ | | | Eₐ |
| 408 | E_{1b}E₂EᵢᵢE₄ | | | Eₐ |
| 409 | E₁ₐE₂EᵢᵢE_{iib}E₄ | | | Eₐ |
| 410 | E_{1b}E₂EᵢᵢE_{iib}E₄ | | | Eₐ |
| 411 | E₁ₐE₂E₃EᵢE₄ | | | Eₐ |
| 412 | E_{1b}E₂E₃EᵢE₄ | | | Eₐ |
| 413 | E₁ₐE₂E₃EᵢᵢE₄ | | | Eₐ |
| 414 | E_{1b}E₂E₃EᵢᵢE₄ | | | Eₐ |
| 415 | E₁ₐE₂E₃EᵢᵢE_{iib}E₄ | | | Eₐ |
| 416 | E_{1b}E₂E₃EᵢᵢE_{iib}E₄ | | | Eₐ |
| 417 | E₁ₐE₂Eᵢᵢᵢ | | | Eₐ |
| 418 | E_{1b}E₂Eᵢᵢᵢ | | | Eₐ |
| 419 | E₁ₐE₂E₃Eᵢᵢᵢ | | | Eₐ |
| 420 | E_{1b}E₂E₃Eᵢᵢᵢ | | | Eₐ |
| 421 | E₁ₐE₂EᵢᵢᵢE₄ | | | Eₐ |
| 422 | E_{1b}E₂EᵢᵢᵢE₄ | | | Eₐ |
| 423 | E₁ₐE₂E₃EᵢᵢᵢE₄ | | | Eₐ |
| 424 | E_{1b}E₂E₃EᵢᵢᵢE₄ | | | Eₐ |
| 425 | E₁ₐE₂Eᵢᵥ | | | Eₐ |
| 426 | E_{1b}E₂Eᵢᵥ | | | Eₐ |
| 427 | E₁ₐE₂E₃Eᵢᵥ | | | Eₐ |
| 428 | E_{1b}E₂E₃Eᵢᵥ | | | Eₐ |
| 429 | E₁ₐE₂EᵢᵥE₄ | | | Eₐ |
| 430 | E_{1b}E₂EᵢᵥE₄ | | | Eₐ |
| 431 | E₁ₐE₂E₃EᵢᵥE₄ | | | Eₐ |
| 432 | E_{1b}E₂E₃EᵢᵥE₄ | | | Eₐ |
| 433 | E₁ₐE₂ | | E₄* | Eₐ |
| 434 | E_{1b}E₂ | | E₄* | Eₐ |
| 435 | E₁ₐE₂E₃ | | E₄* | Eₐ |
| 436 | E_{1b}E₂E₃ | | E₄* | Eₐ |
| 437 | E₁ₐE₂Eᵢ | | E₄* | Eₐ |
| 438 | E_{1b}E₂Eᵢ | | E₄* | Eₐ |
| 439 | E₁ₐE₂Eᵢᵢ | | E₄* | Eₐ |
| 440 | E_{1b}E₂Eᵢᵢ | | E₄* | Eₐ |
| 441 | E₁ₐE₂EᵢᵢE_{iib} | | E₄* | Eₐ |
| 442 | E_{1b}E₂EᵢᵢE_{iib} | | E₄* | Eₐ |
| 443 | E₁ₐE₂E₃Eᵢ | | E₄* | Eₐ |
| 444 | E_{1b}E₂E₃Eᵢ | | E₄* | Eₐ |
| 445 | E₁ₐE₂E₃Eᵢᵢ | | E₄* | Eₐ |
| 446 | E_{1b}E₂E₃Eᵢᵢ | | E₄* | Eₐ |
| 447 | E₁ₐE₂E₃EᵢᵢE_{iib} | | E₄* | Eₐ |
| 448 | E_{1b}E₂E₃EᵢᵢE_{iib} | | E₄* | Eₐ |
| 449 | E₁ₐE₂E₄ | | E₄* | Eₐ |
| 450 | E_{1b}E₂E₄ | | E₄* | Eₐ |
| 451 | E₁ₐE₂E₃E₄ | | E₄* | Eₐ |
| 452 | E_{1b}E₂E₃E₄ | | E₄* | Eₐ |
| 453 | E₁ₐE₂EᵢE₄ | | E₄* | Eₐ |
| 454 | E_{1b}E₂EᵢE₄ | | E₄* | Eₐ |
| 455 | E₁ₐE₂EᵢᵢE₄ | | E₄* | Eₐ |
| 456 | E_{1b}E₂EᵢᵢE₄ | | E₄* | Eₐ |
| 457 | E₁ₐE₂EᵢᵢE_{iib}E₄ | | E₄* | Eₐ |
| 458 | E_{1b}E₂EᵢᵢE_{iib}E₄ | | E₄* | Eₐ |
| 459 | E₁ₐE₂E₃EᵢE₄ | | E₄* | Eₐ |
| 460 | E_{1b}E₂E₃EᵢE₄ | | E₄* | Eₐ |
| 461 | E₁ₐE₂E₃EᵢᵢE₄ | | E₄* | Eₐ |
| 462 | E_{1b}E₂E₃EᵢᵢE₄ | | E₄* | Eₐ |
| 463 | E₁ₐE₂E₃EᵢᵢE_{iib}E₄ | | E₄* | Eₐ |
| 464 | E_{1b}E₂E₃EᵢᵢE_{iib}E₄ | | E₄* | Eₐ |
| 465 | E₁ₐE₂Eᵢᵢᵢ | | E₄* | Eₐ |
| 466 | E_{1b}E₂Eᵢᵢᵢ | | E₄* | Eₐ |
| 467 | E₁ₐE₂E₃Eᵢᵢᵢ | | E₄* | Eₐ |
| 468 | E_{1b}E₂E₃Eᵢᵢᵢ | | E₄* | Eₐ |
| 469 | E₁ₐE₂EᵢᵢᵢE₄ | | E₄* | Eₐ |
| 470 | E_{1b}E₂EᵢᵢᵢE₄ | | E₄* | Eₐ |
| 471 | E₁ₐE₂E₃EᵢᵢᵢE₄ | | E₄* | Eₐ |
| 472 | E_{1b}E₂E₃EᵢᵢᵢE₄ | | E₄* | Eₐ |
| 473 | E₁ₐE₂Eᵢᵥ | | E₄* | Eₐ |
| 474 | E_{1b}E₂Eᵢᵥ | | E₄* | Eₐ |
| 475 | E₁ₐE₂E₃Eᵢᵥ | | E₄* | Eₐ |
| 476 | E_{1b}E₂E₃Eᵢᵥ | | E₄* | Eₐ |
| 477 | E₁ₐE₂EᵢᵥE₄ | | E₄* | Eₐ |
| 478 | E_{1b}E₂EᵢᵥE₄ | | E₄* | Eₐ |
| 479 | E₁ₐE₂E₃EᵢᵥE₄ | | E₄* | Eₐ |
| 480 | E_{1b}E₂E₃EᵢᵥE₄ | | E₄* | Eₐ |
| 481 | E₁ₐE₂ | | E₅ | Eₐ |
| 482 | E_{1b}E₂ | | E₅ | Eₐ |
| 483 | E₁ₐE₂E₃ | | E₅ | Eₐ |
| 484 | E_{1b}E₂E₃ | | E₅ | Eₐ |
| 485 | E₁ₐE₂Eᵢ | | E₅ | Eₐ |
| 486 | E_{1b}E₂Eᵢ | | E₅ | Eₐ |
| 487 | E₁ₐE₂Eᵢᵢ | | E₅ | Eₐ |
| 488 | E_{1b}E₂Eᵢᵢ | | E₅ | Eₐ |
| 489 | E₁ₐE₂EᵢᵢE_{iib} | | E₅ | Eₐ |
| 490 | E_{1b}E₂EᵢᵢE_{iib} | | E₅ | Eₐ |
| 491 | E₁ₐE₂E₃Eᵢ | | E₅ | Eₐ |
| 492 | E_{1b}E₂E₃Eᵢ | | E₅ | Eₐ |
| 493 | E₁ₐE₂E₃Eᵢᵢ | | E₅ | Eₐ |
| 494 | E_{1b}E₂E₃Eᵢᵢ | | E₅ | Eₐ |
| 495 | E₁ₐE₂E₃EᵢᵢE_{iib} | | E₅ | Eₐ |
| 496 | E_{1b}E₂E₃EᵢᵢE_{iib} | | E₅ | Eₐ |
| 497 | E₁ₐE₂E₄ | | E₅ | Eₐ |
| 498 | E_{1b}E₂E₄ | | E₅ | Eₐ |
| 499 | E₁ₐE₂E₃E₄ | | E₅ | Eₐ |
| 500 | E_{1b}E₂E₃E₄ | | E₅ | Eₐ |
| 501 | E₁ₐE₂EᵢE₄ | | E₅ | Eₐ |
| 502 | E_{1b}E₂EᵢE₄ | | E₅ | Eₐ |
| 503 | E₁ₐE₂EᵢᵢE₄ | | E₅ | Eₐ |
| 504 | E_{1b}E₂EᵢᵢE₄ | | E₅ | Eₐ |
| 505 | E₁ₐE₂EᵢᵢE_{iib}E₄ | | E₅ | Eₐ |
| 506 | E_{1b}E₂EᵢᵢE_{iib}E₄ | | E₅ | Eₐ |
| 507 | E₁ₐE₂E₃EᵢE₄ | | E₅ | Eₐ |
| 508 | E_{1b}E₂E₃EᵢE₄ | | E₅ | Eₐ |
| 509 | E₁ₐE₂E₃EᵢᵢE₄ | | E₅ | Eₐ |
| 510 | E_{1b}E₂E₃EᵢᵢE₄ | | E₅ | Eₐ |
| 511 | E₁ₐE₂E₃EᵢᵢE_{iib}E₄ | | E₅ | Eₐ |
| 512 | E_{1b}E₂E₃EᵢᵢE_{iib}E₄ | | E₅ | Eₐ |
| 513 | E₁ₐE₂Eᵢᵢᵢ | | E₅ | Eₐ |
| 514 | E_{1b}E₂Eᵢᵢᵢ | | E₅ | Eₐ |
| 515 | E₁ₐE₂E₃Eᵢᵢᵢ | | E₅ | Eₐ |
| 516 | E_{1b}E₂E₃Eᵢᵢᵢ | | E₅ | Eₐ |
| 517 | E₁ₐE₂EᵢᵢᵢE₄ | | E₅ | Eₐ |
| 518 | E_{1b}E₂EᵢᵢᵢE₄ | | E₅ | Eₐ |
| 519 | E₁ₐE₂E₃EᵢᵢᵢE₄ | | E₅ | Eₐ |
| 520 | E_{1b}E₂E₃EᵢᵢᵢE₄ | | E₅ | Eₐ |
| 521 | E₁ₐE₂Eᵢᵥ | | E₅ | Eₐ |
| 522 | E_{1b}E₂Eᵢᵥ | | E₅ | Eₐ |
| 523 | E₁ₐE₂E₃Eᵢᵥ | | E₅ | Eₐ |
| 524 | E_{1b}E₂E₃Eᵢᵥ | | E₅ | Eₐ |
| 525 | E₁ₐE₂EᵢᵥE₄ | | E₅ | Eₐ |
| 526 | E_{1b}E₂EᵢᵥE₄ | | E₅ | Eₐ |
| 527 | E₁ₐE₂E₃EᵢᵥE₄ | | E₅ | Eₐ |
| 528 | E_{1b}E₂E₃EᵢᵥE₄ | | E₅ | Eₐ |
| 529 | E₁ₐE₂ | | E₄*E₅ | Eₐ |
| 530 | E_{1b}E₂ | | E₄*E₅ | Eₐ |
| 531 | E₁ₐE₂E₃ | | E₄*E₅ | Eₐ |
| 532 | E_{1b}E₂E₃ | | E₄*E₅ | Eₐ |
| 533 | E₁ₐE₂Eᵢ | | E₄*E₅ | Eₐ |
| 534 | E_{1b}E₂Eᵢ | | E₄*E₅ | Eₐ |
| 535 | E₁ₐE₂Eᵢᵢ | | E₄*E₅ | Eₐ |
| 536 | E_{1b}E₂Eᵢᵢ | | E₄*E₅ | Eₐ |
| 537 | E₁ₐE₂EᵢᵢE_{iib} | | E₄*E₅ | Eₐ |
| 538 | E_{1b}E₂EᵢᵢE_{iib} | | E₄*E₅ | Eₐ |
| 539 | E₁ₐE₂E₃Eᵢ | | E₄*E₅ | Eₐ |
| 540 | E_{1b}E₂E₃Eᵢ | | E₄*E₅ | Eₐ |
| 541 | E₁ₐE₂E₃Eᵢᵢ | | E₄*E₅ | Eₐ |
| 542 | E_{1b}E₂E₃Eᵢᵢ | | E₄*E₅ | Eₐ |
| 543 | E₁ₐE₂E₃EᵢᵢE_{iib} | | E₄*E₅ | Eₐ |
| 544 | E_{1b}E₂E₃EᵢᵢE_{iib} | | E₄*E₅ | Eₐ |
| 545 | E₁ₐE₂E₄ | | E₄*E₅ | Eₐ |
| 546 | E_{1b}E₂E₄ | | E₄*E₅ | Eₐ |
| 547 | E₁ₐE₂E₃E₄ | | E₄*E₅ | Eₐ |
| 548 | E_{1b}E₂E₃E₄ | | E₄*E₅ | Eₐ |
| 549 | E₁ₐE₂EᵢE₄ | | E₄*E₅ | Eₐ |
| 550 | E_{1b}E₂EᵢE₄ | | E₄*E₅ | Eₐ |
| 551 | E₁ₐE₂EᵢᵢE₄ | | E₄*E₅ | Eₐ |
| 552 | E_{1b}E₂EᵢᵢE₄ | | E₄*E₅ | Eₐ |
| 553 | E₁ₐE₂EᵢᵢE_{iib}E₄ | | E₄*E₅ | Eₐ |
| 554 | E_{1b}E₂EᵢᵢE_{iib}E₄ | | E₄*E₅ | Eₐ |
| 555 | E₁ₐE₂E₃EᵢE₄ | | E₄*E₅ | Eₐ |
| 556 | E_{1b}E₂E₃EᵢE₄ | | E₄*E₅ | Eₐ |
| 557 | E₁ₐE₂E₃EᵢᵢE₄ | | E₄*E₅ | Eₐ |
| 558 | E_{1b}E₂E₃EᵢᵢE₄ | | E₄*E₅ | Eₐ |
| 559 | E₁ₐE₂E₃EᵢᵢE_{iib}E₄ | | E₄*E₅ | Eₐ |
| 560 | E_{1b}E₂E₃EᵢᵢE_{iib}E₄ | | E₄*E₅ | Eₐ |
| 561 | E₁ₐE₂Eᵢᵢᵢ | | E₄*E₅ | Eₐ |
| 562 | E_{1b}E₂Eᵢᵢᵢ | | E₄*E₅ | Eₐ |
| 563 | E₁ₐE₂E₃Eᵢᵢᵢ | | E₄*E₅ | Eₐ |
| 564 | E_{1b}E₂E₃Eᵢᵢᵢ | | E₄*E₅ | Eₐ |
| 565 | E₁ₐE₂EᵢᵢᵢE₄ | | E₄*E₅ | Eₐ |
| 566 | E_{1b}E₂EᵢᵢᵢE₄ | | E₄*E₅ | Eₐ |
| 567 | E₁ₐE₂E₃EᵢᵢᵢE₄ | | E₄*E₅ | Eₐ |
| 568 | E_{1b}E₂E₃EᵢᵢᵢE₄ | | E₄*E₅ | Eₐ |
| 569 | E₁ₐE₂Eᵢᵥ | | E₄*E₅ | Eₐ |
| 570 | E_{1b}E₂Eᵢᵥ | | E₄*E₅ | Eₐ |
| 571 | E₁ₐE₂E₃Eᵢᵥ | | E₄*E₅ | Eₐ |
| 572 | E_{1b}E₂E₃Eᵢᵥ | | E₄*E₅ | Eₐ |
| 573 | E₁ₐE₂EᵢᵥE₄ | | E₄*E₅ | Eₐ |
| 574 | E_{1b}E₂EᵢᵥE₄ | | E₄*E₅ | Eₐ |
| 575 | E₁ₐE₂E₃EᵢᵥE₄ | | E₄*E₅ | Eₐ |
| 576 | E_{1b}E₂E₃EᵢᵥE₄ | | E₄*E₅ | Eₐ |
| 577 | E₁ₐE₂ | AlkL | | Eₐ |
| 578 | E_{1b}E₂ | AlkL | | Eₐ |
| 579 | E₁ₐE₂E₃ | AlkL | | Eₐ |
| 580 | E_{1b}E₂E₃ | AlkL | | Eₐ |
| 581 | E₁ₐE₂Eᵢ | AlkL | | Eₐ |
| 582 | E_{1b}E₂Eᵢ | AlkL | | Eₐ |
| 583 | E₁ₐE₂Eᵢᵢ | AlkL | | Eₐ |
| 584 | E_{1b}E₂Eᵢᵢ | AlkL | | Eₐ |
| 585 | E₁ₐE₂EᵢᵢE_{iib} | AlkL | | Eₐ |
| 586 | E_{1b}E₂EᵢᵢE_{iib} | AlkL | | Eₐ |
| 587 | E₁ₐE₂E₃Eᵢ | AlkL | | Eₐ |
| 588 | E_{1b}E₂E₃Eᵢ | AlkL | | Eₐ |
| 589 | E₁ₐE₂E₃Eᵢᵢ | AlkL | | Eₐ |
| 590 | E_{1b}E₂E₃Eᵢᵢ | AlkL | | Eₐ |
| 591 | E₁ₐE₂E₃EᵢᵢE_{iib} | AlkL | | Eₐ |
| 592 | E_{1b}E₂E₃EᵢᵢE_{iib} | AlkL | | Eₐ |
| 593 | E₁ₐE₂E₄ | AlkL | | Eₐ |
| 594 | E_{1b}E₂E₄ | AlkL | | Eₐ |
| 595 | E₁ₐE₂E₃E₄ | AlkL | | Eₐ |
| 596 | E_{1b}E₂E₃E₄ | AlkL | | Eₐ |
| 597 | E₁ₐE₂EᵢE₄ | AlkL | | Eₐ |
| 598 | E_{1b}E₂EᵢE₄ | AlkL | | Eₐ |
| 599 | E₁ₐE₂EᵢᵢE₄ | AlkL | | Eₐ |
| 600 | E_{1b}E₂EᵢᵢE₄ | AlkL | | Eₐ |
| 601 | E₁ₐE₂EᵢᵢE_{iib}E₄ | AlkL | | Eₐ |
| 602 | E_{1b}E₂EᵢᵢE_{iib}E₄ | AlkL | | Eₐ |
| 603 | E₁ₐE₂E₃EᵢE₄ | AlkL | | Eₐ |
| 604 | E_{1b}E₂E₃EᵢE₄ | AlkL | | Eₐ |
| 605 | E₁ₐE₂E₃EᵢᵢE₄ | AlkL | | Eₐ |
| 606 | E_{1b}E₂E₃EᵢᵢE₄ | AlkL | | Eₐ |
| 607 | E₁ₐE₂E₃EᵢᵢE_{iib}E₄ | AlkL | | Eₐ |
| 608 | E_{1b}E₂E₃EᵢᵢE_{iib}E₄ | AlkL | | Eₐ |
| 609 | E₁ₐE₂Eᵢᵢᵢ | AlkL | | Eₐ |
| 610 | E_{1b}E₂Eᵢᵢᵢ | AlkL | | Eₐ |
| 611 | E₁ₐE₂E₃Eᵢᵢᵢ | AlkL | | Eₐ |
| 612 | E_{1b}E₂E₃Eᵢᵢᵢ | AlkL | | Eₐ |
| 613 | E₁ₐE₂EᵢᵢᵢE₄ | AlkL | | Eₐ |
| 614 | E_{1b}E₂EᵢᵢᵢE₄ | AlkL | | Eₐ |
| 615 | E₁ₐE₂E₃EᵢᵢᵢE₄ | AlkL | | Eₐ |
| 616 | E_{1b}E₂E₃EᵢᵢᵢE₄ | AlkL | | Eₐ |
| 617 | E₁ₐE₂Eᵢᵥ | AlkL | | Eₐ |
| 618 | E_{1b}E₂Eᵢᵥ | AlkL | | Eₐ |
| 619 | E₁ₐE₂E₃Eᵢᵥ | AlkL | | Eₐ |
| 620 | E_{1b}E₂E₃Eᵢᵥ | AlkL | | Eₐ |
| 621 | E₁ₐE₂EᵢᵥE₄ | AlkL | | Eₐ |
| 622 | E_{1b}E₂EᵢᵥE₄ | AlkL | | Eₐ |
| 623 | E₁ₐE₂E₃EᵢᵥE₄ | AlkL | | Eₐ |
| 624 | E_{1b}E₂E₃EᵢᵥE₄ | AlkL | | Eₐ |
| 625 | E₁ₐE₂ | AlkL | E₄* | Eₐ |
| 626 | E_{1b}E₂ | AlkL | E₄* | Eₐ |
| 627 | E₁ₐE₂E₃ | AlkL | E₄* | Eₐ |
| 628 | E_{1b}E₂E₃ | AlkL | E₄* | Eₐ |
| 629 | E₁ₐE₂Eᵢ | AlkL | E₄* | Eₐ |
| 630 | E_{1b}E₂Eᵢ | AlkL | E₄* | Eₐ |
| 631 | E₁ₐE₂Eᵢᵢ | AlkL | E₄* | Eₐ |
| 632 | E_{1b}E₂Eᵢᵢ | AlkL | E₄* | Eₐ |
| 633 | E₁ₐE₂EᵢᵢE_{iib} | AlkL | E₄* | Eₐ |
| 634 | E_{1b}E₂EᵢᵢE_{iib} | AlkL | E₄* | Eₐ |
| 635 | E₁ₐE₂E₃Eᵢ | AlkL | E₄* | Eₐ |
| 636 | E_{1b}E₂E₃Eᵢ | AlkL | E₄* | Eₐ |
| 637 | E₁ₐE₂E₃Eᵢᵢ | AlkL | E₄* | Eₐ |
| 638 | E_{1b}E₂E₃Eᵢᵢ | AlkL | E₄* | Eₐ |
| 639 | E₁ₐE₂E₃EᵢᵢE_{iib} | AlkL | E₄* | Eₐ |
| 640 | E_{1b}E₂E₃EᵢᵢE_{iib} | AlkL | E₄* | Eₐ |
| 641 | E₁ₐE₂E₄ | AlkL | E₄* | Eₐ |
| 642 | E_{1b}E₂E₄ | AlkL | E₄* | Eₐ |
| 643 | E₁ₐE₂E₃E₄ | AlkL | E₄* | Eₐ |
| 644 | E_{1b}E₂E₃E₄ | AlkL | E₄* | Eₐ |
| 645 | E₁ₐE₂EᵢE₄ | AlkL | E₄* | Eₐ |
| 646 | E_{1b}E₂EᵢE₄ | AlkL | E₄* | Eₐ |
| 647 | E₁ₐE₂EᵢᵢE₄ | AlkL | E₄* | Eₐ |
| 648 | E_{1b}E₂EᵢᵢE₄ | AlkL | E₄* | Eₐ |
| 649 | E₁ₐE₂EᵢᵢE_{iib}E₄ | AlkL | E₄* | Eₐ |
| 650 | E_{1b}E₂EᵢᵢE_{iib}E₄ | AlkL | E₄* | Eₐ |
| 651 | E₁ₐE₂E₃EᵢE₄ | AlkL | E₄* | Eₐ |
| 652 | E_{1b}E₂E₃EᵢE₄ | AlkL | E₄* | Eₐ |
| 653 | E₁ₐE₂E₃EᵢᵢE₄ | AlkL | E₄* | Eₐ |
| 654 | E_{1b}E₂E₃EᵢᵢE₄ | AlkL | E₄* | Eₐ |
| 655 | E₁ₐE₂E₃EᵢᵢE_{iib}E₄ | AlkL | E₄* | Eₐ |
| 656 | E_{1b}E₂E₃EᵢᵢE_{iib}E₄ | AlkL | E₄* | Eₐ |
| 657 | E₁ₐE₂Eᵢᵢᵢ | AlkL | E₄* | Eₐ |
| 658 | E_{1b}E₂Eᵢᵢᵢ | AlkL | E₄* | Eₐ |
| 659 | E₁ₐE₂E₃Eᵢᵢᵢ | AlkL | E₄* | Eₐ |
| 660 | E_{1b}E₂E₃Eᵢᵢᵢ | AlkL | E₄* | Eₐ |
| 661 | E₁ₐE₂EᵢᵢᵢE₄ | AlkL | E₄* | Eₐ |
| 662 | E_{1b}E₂EᵢᵢᵢE₄ | AlkL | E₄* | Eₐ |
| 663 | E₁ₐE₂E₃EᵢᵢᵢE₄ | AlkL | E₄* | Eₐ |
| 664 | E_{1b}E₂E₃EᵢᵢᵢE₄ | AlkL | E₄* | Eₐ |
| 665 | E₁ₐE₂Eᵢᵥ | AlkL | E₄* | Eₐ |
| 666 | E_{1b}E₂Eᵢᵥ | AlkL | E₄* | Eₐ |
| 667 | E₁ₐE₂E₃Eᵢᵥ | AlkL | E₄* | Eₐ |
| 668 | E_{1b}E₂E₃Eᵢᵥ | AlkL | E₄* | Eₐ |
| 669 | E₁ₐE₂EᵢᵥE₄ | AlkL | E₄* | Eₐ |
| 670 | E_{1b}E₂EᵢᵥE₄ | AlkL | E₄* | Eₐ |
| 671 | E₁ₐE₂E₃EᵢᵥE₄ | AlkL | E₄* | Eₐ |
| 672 | E_{1b}E₂E₃EᵢᵥE₄ | AlkL | E₄* | Eₐ |
| 673 | E₁ₐE₂ | AlkL | E₅ | Eₐ |
| 674 | E_{1b}E₂ | AlkL | E₅ | Eₐ |
| 675 | E₁ₐE₂E₃ | AlkL | E₅ | Eₐ |
| 676 | E_{1b}E₂E₃ | AlkL | E₅ | Eₐ |
| 677 | E₁ₐE₂Eᵢ | AlkL | E₅ | Eₐ |
| 678 | E_{1b}E₂Eᵢ | AlkL | E₅ | Eₐ |
| 679 | E₁ₐE₂Eᵢᵢ | AlkL | E₅ | Eₐ |
| 680 | E_{1b}E₂Eᵢᵢ | AlkL | E₅ | Eₐ |
| 681 | E₁ₐE₂EᵢᵢE_{iib} | AlkL | E₅ | Eₐ |
| 682 | E_{1b}E₂EᵢᵢE_{iib} | AlkL | E₅ | Eₐ |
| 683 | E₁ₐE₂E₃Eᵢ | AlkL | E₅ | Eₐ |
| 684 | E_{1b}E₂E₃Eᵢ | AlkL | E₅ | Eₐ |
| 685 | E₁ₐE₂E₃Eᵢᵢ | AlkL | E₅ | Eₐ |
| 686 | E_{1b}E₂E₃Eᵢᵢ | AlkL | E₅ | Eₐ |
| 687 | E₁ₐE₂E₃EᵢᵢE_{iib} | AlkL | E₅ | Eₐ |
| 688 | E_{1b}E₂E₃EᵢᵢE_{iib} | AlkL | E₅ | Eₐ |
| 689 | E₁ₐE₂E₄ | AlkL | E₅ | Eₐ |
| 690 | E_{1b}E₂E₄ | AlkL | E₅ | Eₐ |
| 691 | E₁ₐE₂E₃E₄ | AlkL | E₅ | Eₐ |
| 692 | E_{1b}E₂E₃E₄ | AlkL | E₅ | Eₐ |
| 693 | E₁ₐE₂EᵢE₄ | AlkL | E₅ | Eₐ |
| 694 | E_{1b}E₂EᵢE₄ | AlkL | E₅ | Eₐ |
| 695 | E₁ₐE₂EᵢᵢE₄ | AlkL | E₅ | Eₐ |
| 696 | E_{1b}E₂EᵢᵢE₄ | AlkL | E₅ | Eₐ |
| 697 | E₁ₐE₂EᵢᵢE_{iib}E₄ | AlkL | E₅ | Eₐ |
| 698 | E_{1b}E₂EᵢᵢE_{iib}E₄ | AlkL | E₅ | Eₐ |
| 699 | E₁ₐE₂E₃EᵢE₄ | AlkL | E₅ | Eₐ |
| 700 | E_{1b}E₂E₃EᵢE₄ | AlkL | E₅ | Eₐ |
| 701 | E₁ₐE₂E₃EᵢᵢE₄ | AlkL | E₅ | Eₐ |
| 702 | E_{1b}E₂E₃EᵢᵢE₄ | AlkL | E₅ | Eₐ |
| 703 | E₁ₐE₂E₃EᵢᵢE_{iib}E₄ | AlkL | E₅ | Eₐ |
| 704 | E_{1b}E₂E₃EᵢᵢE_{iib}E₄ | AlkL | E₅ | Eₐ |
| 705 | E₁ₐE₂Eᵢᵢᵢ | AlkL | E₅ | Eₐ |
| 706 | E_{1b}E₂Eᵢᵢᵢ | AlkL | E₅ | Eₐ |
| 707 | E₁ₐE₂E₃Eᵢᵢᵢ | AlkL | E₅ | Eₐ |
| 708 | E_{1b}E₂E₃Eᵢᵢᵢ | AlkL | E₅ | Eₐ |
| 709 | E₁ₐE₂EᵢᵢᵢE₄ | AlkL | E₅ | Eₐ |
| 710 | E_{1b}E₂EᵢᵢᵢE₄ | AlkL | E₅ | Eₐ |
| 711 | E₁ₐE₂E₃EᵢᵢᵢE₄ | AlkL | E₅ | Eₐ |
| 712 | E_{1b}E₂E₃EᵢᵢᵢE₄ | AlkL | E₅ | Eₐ |
| 713 | E₁ₐE₂Eᵢᵥ | AlkL | E₅ | Eₐ |
| 714 | E_{1b}E₂Eᵢᵥ | AlkL | E₅ | Eₐ |
| 715 | E₁ₐE₂E₃Eᵢᵥ | AlkL | E₅ | Eₐ |
| 716 | E_{1b}E₂E₃Eᵢᵥ | AlkL | E₅ | Eₐ |
| 717 | E₁ₐE₂EᵢᵥE₄ | AlkL | E₅ | Eₐ |
| 718 | E_{1b}E₂EᵢᵥE₄ | AlkL | E₅ | Eₐ |
| 719 | E₁ₐE₂E₃EᵢᵥE₄ | AlkL | E₅ | Eₐ |
| 720 | E_{1b}E₂E₃EᵢᵥE₄ | AlkL | E₅ | Eₐ |
| 721 | E₁ₐE₂ | AlkL | E₄*E₅ | Eₐ |
| 722 | E_{1b}E₂ | AlkL | E₄*E₅ | Eₐ |
| 723 | E₁ₐE₂E₃ | AlkL | E₄*E₅ | Eₐ |
| 724 | E_{1b}E₂E₃ | AlkL | E₄*E₅ | Eₐ |
| 725 | E₁ₐE₂Eᵢ | AlkL | E₄*E₅ | Eₐ |
| 726 | E_{1b}E₂Eᵢ | AlkL | E₄*E₅ | Eₐ |
| 727 | E₁ₐE₂Eᵢᵢ | AlkL | E₄*E₅ | Eₐ |
| 728 | E_{1b}E₂Eᵢᵢ | AlkL | E₄*E₅ | Eₐ |
| 729 | E₁ₐE₂EᵢᵢE_{iib} | AlkL | E₄*E₅ | Eₐ |
| 730 | E_{1b}E₂EᵢᵢE_{iib} | AlkL | E₄*E₅ | Eₐ |
| 731 | E₁ₐE₂E₃Eᵢ | AlkL | E₄*E₅ | Eₐ |
| 732 | E_{1b}E₂E₃Eᵢ | AlkL | E₄*E₅ | Eₐ |
| 733 | E₁ₐE₂E₃Eᵢᵢ | AlkL | E₄*E₅ | Eₐ |
| 734 | E_{1b}E₂E₃Eᵢᵢ | AlkL | E₄*E₅ | Eₐ |
| 735 | E₁ₐE₂E₃EᵢᵢE_{iib} | AlkL | E₄*E₅ | Eₐ |
| 736 | E_{1b}E₂E₃EᵢᵢE_{iib} | AlkL | E₄*E₅ | Eₐ |
| 737 | E₁ₐE₂E₄ | AlkL | E₄*E₅ | Eₐ |
| 738 | E_{1b}E₂E₄ | AlkL | E₄*E₅ | Eₐ |
| 739 | E₁ₐE₂E₃E₄ | AlkL | E₄*E₅ | Eₐ |
| 740 | E_{1b}E₂E₃E₄ | AlkL | E₄*E₅ | Eₐ |
| 741 | E₁ₐE₂EᵢE₄ | AlkL | E₄*E₅ | Eₐ |
| 742 | E_{1b}E₂EᵢE₄ | AlkL | E₄*E₅ | Eₐ |
| 743 | E₁ₐE₂EᵢᵢE₄ | AlkL | E₄*E₅ | Eₐ |
| 744 | E_{1b}E₂EᵢᵢE₄ | AlkL | E₄*E₅ | Eₐ |
| 745 | E₁ₐE₂EᵢᵢE_{iib}E₄ | AlkL | E₄*E₅ | Eₐ |
| 746 | E_{1b}E₂EᵢᵢE_{iib}E₄ | AlkL | E₄*E₅ | Eₐ |
| 747 | E₁ₐE₂E₃EᵢE₄ | AlkL | E₄*E₅ | Eₐ |
| 748 | E_{1b}E₂E₃EᵢE₄ | AlkL | E₄*E₅ | Eₐ |
| 749 | E₁ₐE₂E₃EᵢᵢE₄ | AlkL | E₄*E₅ | Eₐ |
| 750 | E_{1b}E₂E₃EᵢᵢE₄ | AlkL | E₄*E₅ | Eₐ |
| 751 | E₁ₐE₂E₃EᵢᵢE_{iib}E₄ | AlkL | E₄*E₅ | Eₐ |
| 752 | E_{1b}E₂E₃EᵢᵢE_{iib}E₄ | AlkL | E₄*E₅ | Eₐ |
| 753 | E₁ₐE₂Eᵢᵢᵢ | AlkL | E₄*E₅ | Eₐ |
| 754 | E_{1b}E₂Eᵢᵢᵢ | AlkL | E₄*E₅ | Eₐ |
| 755 | E₁ₐE₂E₃Eᵢᵢᵢ | AlkL | E₄*E₅ | Eₐ |
| 756 | E_{1b}E₂E₃Eᵢᵢᵢ | AlkL | E₄*E₅ | Eₐ |
| 757 | E₁ₐE₂EᵢᵢᵢE₄ | AlkL | E₄*E₅ | Eₐ |
| 758 | E_{1b}E₂EᵢᵢᵢE₄ | AlkL | E₄*E₅ | Eₐ |
| 759 | E₁ₐE₂E₃EᵢᵢᵢE₄ | AlkL | E₄*E₅ | Eₐ |
| 760 | E_{1b}E₂E₃EᵢᵢᵢE₄ | AlkL | E₄*E₅ | Eₐ |
| 761 | E₁ₐE₂Eᵢᵥ | AlkL | E₄*E₅ | Eₐ |
| 762 | E_{1b}E₂Eᵢᵥ | AlkL | E₄*E₅ | Eₐ |
| 763 | E₁ₐE₂E₃Eᵢᵥ | AlkL | E₄*E₅ | Eₐ |
| 764 | E_{1b}E₂E₃Eᵢᵥ | AlkL | E₄*E₅ | Eₐ |
| 765 | E₁ₐE₂EᵢᵥE₄ | AlkL | E₄*E₅ | Eₐ |
| 766 | E_{1b}E₂EᵢᵥE₄ | AlkL | E₄*E₅ | Eₐ |
| 767 | E₁ₐE₂E₃EᵢᵥE₄ | AlkL | E₄*E₅ | Eₐ |
| 768 | E_{1b}E₂E₃EᵢᵥE₄ | AlkL | E₄*E₅ | Eₐ |
| 769 | E₁ₐE₂ | | | E_{b} |
| 770 | E_{1b}E₂ | | | E_{b} |
| 771 | E₁ₐE₂E₃ | | | E_{b} |
| 772 | E_{1b}E₂E₃ | | | E_{b} |
| 773 | E₁ₐE₂Eᵢ | | | E_{b} |
| 774 | E_{1b}E₂Eᵢ | | | E_{b} |
| 775 | E₁ₐE₂Eᵢᵢ | | | E_{b} |
| 776 | E_{1b}E₂Eᵢᵢ | | | E_{b} |
| 777 | E₁ₐE₂EᵢᵢE_{iib} | | | E_{b} |
| 778 | E_{1b}E₂EᵢᵢE_{iib} | | | E_{b} |
| 779 | E₁ₐE₂E₃Eᵢ | | | E_{b} |
| 780 | E_{1b}E₂E₃Eᵢ | | | E_{b} |
| 781 | E₁ₐE₂E₃Eᵢᵢ | | | E_{b} |
| 782 | E_{1b}E₂E₃Eᵢᵢ | | | E_{b} |
| 783 | E₁ₐE₂E₃EᵢᵢE_{iib} | | | E_{b} |
| 784 | E_{1b}E₂E₃EᵢᵢE_{iib} | | | E_{b} |
| 785 | E₁ₐE₂E₄ | | | E_{b} |
| 786 | E_{1b}E₂E₄ | | | E_{b} |
| 787 | E₁ₐE₂E₃E₄ | | | E_{b} |
| 788 | E_{1b}E₂E₃E₄ | | | E_{b} |
| 789 | E₁ₐE₂EᵢE₄ | | | E_{b} |
| 790 | E_{1b}E₂EᵢE₄ | | | E_{b} |
| 791 | E₁ₐE₂EᵢᵢE₄ | | | E_{b} |
| 792 | E_{1b}E₂EᵢᵢE₄ | | | E_{b} |
| 793 | E₁ₐE₂EᵢᵢE_{iib}E₄ | | | E_{b} |
| 794 | E_{1b}E₂EᵢᵢE_{iib}E₄ | | | E_{b} |
| 795 | E₁ₐE₂E₃EᵢE₄ | | | E_{b} |
| 796 | E_{1b}E₂E₃EᵢE₄ | | | E_{b} |
| 797 | E₁ₐE₂E₃EᵢᵢE₄ | | | E_{b} |
| 798 | E_{1b}E₂E₃EᵢᵢE₄ | | | E_{b} |
| 799 | E₁ₐE₂E₃EᵢᵢE_{iib}E₄ | | | E_{b} |
| 800 | E_{1b}E₂E₃EᵢᵢE_{iib}E₄ | | | E_{b} |
| 801 | E₁ₐE₂Eᵢᵢᵢ | | | E_{b} |
| 802 | E_{1b}E₂Eᵢᵢᵢ | | | E_{b} |
| 803 | E₁ₐE₂E₃Eᵢᵢᵢ | | | E_{b} |
| 804 | E_{1b}E₂E₃Eᵢᵢᵢ | | | E_{b} |
| 805 | E₁ₐE₂EᵢᵢᵢE₄ | | | E_{b} |
| 806 | E_{1b}E₂EᵢᵢᵢE₄ | | | E_{b} |
| 807 | E₁ₐE₂E₃EᵢᵢᵢE₄ | | | E_{b} |
| 808 | E_{1b}E₂E₃EᵢᵢᵢE₄ | | | E_{b} |
| 809 | E₁ₐE₂Eᵢᵥ | | | E_{b} |
| 810 | E_{1b}E₂Eᵢᵥ | | | E_{b} |
| 811 | E₁ₐE₂E₃Eᵢᵥ | | | E_{b} |
| 812 | E_{1b}E₂E₃Eᵢᵥ | | | E_{b} |
| 813 | E₁ₐE₂EᵢᵥE₄ | | | E_{b} |
| 814 | E_{1b}E₂EᵢᵥE₄ | | | E_{b} |
| 815 | E₁ₐE₂E₃EᵢᵥE₄ | | | E_{b} |
| 816 | E_{1b}E₂E₃EᵢᵥE₄ | | | E_{b} |
| 817 | E₁ₐE₂ | | E₄* | E_{b} |
| 818 | E_{1b}E₂ | | E₄* | E_{b} |
| 819 | E₁ₐE₂E₃ | | E₄* | E_{b} |
| 820 | E_{1b}E₂E₃ | | E₄* | E_{b} |
| 821 | E₁ₐE₂Eᵢ | | E₄* | E_{b} |
| 822 | E_{1b}E₂Eᵢ | | E₄* | E_{b} |
| 823 | E₁ₐE₂Eᵢᵢ | | E₄* | E_{b} |
| 824 | E_{1b}E₂Eᵢᵢ | | E₄* | E_{b} |
| 825 | E₁ₐE₂EᵢᵢE_{iib} | | E₄* | E_{b} |
| 826 | E_{1b}E₂EᵢᵢE_{iib} | | E₄* | E_{b} |
| 827 | E₁ₐE₂E₃Eᵢ | | E₄* | E_{b} |
| 828 | E_{1b}E₂E₃Eᵢ | | E₄* | E_{b} |
| 829 | E₁ₐE₂E₃Eᵢᵢ | | E₄* | E_{b} |
| 830 | E_{1b}E₂E₃Eᵢᵢ | | E₄* | E_{b} |
| 831 | E₁ₐE₂E₃EᵢᵢE_{iib} | | E₄* | E_{b} |
| 832 | E_{1b}E₂E₃EᵢᵢE_{iib} | | E₄* | E_{b} |
| 833 | E₁ₐE₂E₄ | | E₄* | E_{b} |
| 834 | E_{1b}E₂E₄ | | E₄* | E_{b} |
| 835 | E₁ₐE₂E₃E₄ | | E₄* | E_{b} |
| 836 | E_{1b}E₂E₃E₄ | | E₄* | E_{b} |
| 837 | E₁ₐE₂EᵢE₄ | | E₄* | E_{b} |
| 838 | E_{1b}E₂EᵢE₄ | | E₄* | E_{b} |
| 839 | E₁ₐE₂EᵢᵢE₄ | | E₄* | E_{b} |
| 840 | E_{1b}E₂EᵢᵢE₄ | | E₄* | E_{b} |
| 841 | E₁ₐE₂EᵢᵢE_{iib}E₄ | | E₄* | E_{b} |
| 842 | E_{1b}E₂EᵢᵢE_{iib}E₄ | | E₄* | E_{b} |
| 843 | E₁ₐE₂E₃EᵢE₄ | | E₄* | E_{b} |
| 844 | E_{1b}E₂E₃EᵢE₄ | | E₄* | E_{b} |
| 845 | E₁ₐE₂E₃EᵢᵢE₄ | | E₄* | E_{b} |
| 846 | E_{1b}E₂E₃EᵢᵢE₄ | | E₄* | E_{b} |
| 847 | E₁ₐE₂E₃EᵢᵢE_{iib}E₄ | | E₄* | E_{b} |
| 848 | E_{1b}E₂E₃EᵢᵢE_{iib}E₄ | | E₄* | E_{b} |
| 849 | E₁ₐE₂Eᵢᵢᵢ | | E₄* | E_{b} |
| 850 | E_{1b}E₂Eᵢᵢᵢ | | E₄* | E_{b} |
| 851 | E₁ₐE₂E₃Eᵢᵢᵢ | | E₄* | E_{b} |
| 852 | E_{1b}E₂E₃Eᵢᵢᵢ | | E₄* | E_{b} |
| 853 | E₁ₐE₂EᵢᵢᵢE₄ | | E₄* | E_{b} |
| 854 | E_{1b}E₂EᵢᵢᵢE₄ | | E₄* | E_{b} |
| 855 | E₁ₐE₂E₃EᵢᵢᵢE₄ | | E₄* | E_{b} |
| 856 | E_{1b}E₂E₃EᵢᵢᵢE₄ | | E₄* | E_{b} |
| 857 | E₁ₐE₂Eᵢᵥ | | E₄* | E_{b} |
| 858 | E_{1b}E₂Eᵢᵥ | | E₄* | E_{b} |
| 859 | E₁ₐE₂E₃Eᵢᵥ | | E₄* | E_{b} |
| 860 | E_{1b}E₂E₃Eᵢᵥ | | E₄* | E_{b} |
| 861 | E₁ₐE₂EᵢᵥE₄ | | E₄* | E_{b} |
| 862 | E_{1b}E₂EᵢᵥE₄ | | E₄* | E_{b} |
| 863 | E₁ₐE₂E₃EᵢᵥE₄ | | E₄* | E_{b} |
| 864 | E_{1b}E₂E₃EᵢᵥE₄ | | E₄* | E_{b} |
| 865 | E₁ₐE₂ | | E₅ | E_{b} |
| 866 | E_{1b}E₂ | | E₅ | E_{b} |
| 867 | E₁ₐE₂E₃ | | E₅ | E_{b} |
| 868 | E_{1b}E₂E₃ | | E₅ | E_{b} |
| 869 | E₁ₐE₂Eᵢ | | E₅ | E_{b} |
| 870 | E_{1b}E₂Eᵢ | | E₅ | E_{b} |
| 871 | E₁ₐE₂Eᵢᵢ | | E₅ | E_{b} |
| 872 | E_{1b}E₂Eᵢᵢ | | E₅ | E_{b} |
| 873 | E₁ₐE₂EᵢᵢE_{iib} | | E₅ | E_{b} |
| 874 | E_{1b}E₂EᵢᵢE_{iib} | | E₅ | E_{b} |
| 875 | E₁ₐE₂E₃Eᵢ | | E₅ | E_{b} |
| 876 | E_{1b}E₂E₃Eᵢ | | E₅ | E_{b} |
| 877 | E₁ₐE₂E₃Eᵢᵢ | | E₅ | E_{b} |
| 878 | E_{1b}E₂E₃Eᵢᵢ | | E₅ | E_{b} |
| 879 | E₁ₐE₂E₃EᵢᵢE_{iib} | | E₅ | E_{b} |
| 880 | E_{1b}E₂E₃EᵢᵢE_{iib} | | E₅ | E_{b} |
| 881 | E₁ₐE₂E₄ | | E₅ | E_{b} |
| 882 | E_{1b}E₂E₄ | | E₅ | E_{b} |
| 883 | E₁ₐE₂E₃E₄ | | E₅ | E_{b} |
| 884 | E_{1b}E₂E₃E₄ | | E₅ | E_{b} |
| 885 | E₁ₐE₂EᵢE₄ | | E₅ | E_{b} |
| 886 | E_{1b}E₂EᵢE₄ | | E₅ | E_{b} |
| 887 | E₁ₐE₂EᵢᵢE₄ | | E₅ | E_{b} |
| 888 | E_{1b}E₂EᵢᵢE₄ | | E₅ | E_{b} |
| 889 | E₁ₐE₂EᵢᵢE_{iib}E₄ | | E₅ | E_{b} |
| 890 | E_{1b}E₂EᵢᵢE_{iib}E₄ | | E₅ | E_{b} |
| 891 | E₁ₐE₂E₃EᵢE₄ | | E₅ | E_{b} |
| 892 | E_{1b}E₂E₃EᵢE₄ | | E₅ | E_{b} |
| 893 | E₁ₐE₂E₃EᵢᵢE₄ | | E₅ | E_{b} |
| 894 | E_{1b}E₂E₃EᵢᵢE₄ | | E₅ | E_{b} |
| 895 | E₁ₐE₂E₃EᵢᵢE_{iib}E₄ | | E₅ | E_{b} |
| 896 | E_{1b}E₂E₃EᵢᵢE_{iib}E₄ | | E₅ | E_{b} |
| 897 | E₁ₐE₂Eᵢᵢᵢ | | E₅ | E_{b} |
| 898 | E_{1b}E₂Eᵢᵢᵢ | | E₅ | E_{b} |
| 899 | E₁ₐE₂E₃Eᵢᵢᵢ | | E₅ | E_{b} |
| 900 | E_{1b}E₂E₃Eᵢᵢᵢ | | E₅ | E_{b} |
| 901 | E₁ₐE₂EᵢᵢᵢE₄ | | E₅ | E_{b} |
| 902 | E_{1b}E₂EᵢᵢᵢE₄ | | E₅ | E_{b} |
| 903 | E₁ₐE₂E₃EᵢᵢᵢE₄ | | E₅ | E_{b} |
| 904 | E_{1b}E₂E₃EᵢᵢᵢE₄ | | E₅ | E_{b} |
| 905 | E₁ₐE₂Eᵢᵥ | | E₅ | E_{b} |
| 906 | E_{1b}E₂Eᵢᵥ | | E₅ | E_{b} |
| 907 | E₁ₐE₂E₃Eᵢᵥ | | E₅ | E_{b} |
| 908 | E_{1b}E₂E₃Eᵢᵥ | | E₅ | E_{b} |
| 909 | E₁ₐE₂EᵢᵥE₄ | | E₅ | E_{b} |
| 910 | E_{1b}E₂EᵢᵥE₄ | | E₅ | E_{b} |
| 911 | E₁ₐE₂E₃EᵢᵥE₄ | | E₅ | E_{b} |
| 912 | E_{1b}E₂E₃EᵢᵥE₄ | | E₅ | E_{b} |
| 913 | E₁ₐE₂ | | E₄*E₅ | E_{b} |
| 914 | E_{1b}E₂ | | E₄*E₅ | E_{b} |
| 915 | E₁ₐE₂E₃ | | E₄*E₅ | E_{b} |
| 916 | E_{1b}E₂E₃ | | E₄*E₅ | E_{b} |
| 917 | E₁ₐE₂Eᵢ | | E₄*E₅ | E_{b} |
| 918 | E_{1b}E₂Eᵢ | | E₄*E₅ | E_{b} |
| 919 | E₁ₐE₂Eᵢᵢ | | E₄*E₅ | E_{b} |
| 920 | E_{1b}E₂Eᵢᵢ | | E₄*E₅ | E_{b} |
| 921 | E₁ₐE₂EᵢᵢE_{iib} | | E₄*E₅ | E_{b} |
| 922 | E_{1b}E₂EᵢᵢE_{iib} | | E₄*E₅ | E_{b} |
| 923 | E₁ₐE₂E₃Eᵢ | | E₄*E₅ | E_{b} |
| 924 | E_{1b}E₂E₃Eᵢ | | E₄*E₅ | E_{b} |
| 925 | E₁ₐE₂E₃Eᵢᵢ | | E₄*E₅ | E_{b} |
| 926 | E_{1b}E₂E₃Eᵢᵢ | | E₄*E₅ | E_{b} |
| 927 | E₁ₐE₂E₃EᵢᵢE_{iib} | | E₄*E₅ | E_{b} |
| 928 | E_{1b}E₂E₃EᵢᵢE_{iib} | | E₄*E₅ | E_{b} |
| 929 | E₁ₐE₂E₄ | | E₄*E₅ | E_{b} |
| 930 | E_{1b}E₂E₄ | | E₄*E₅ | E_{b} |
| 931 | E₁ₐE₂E₃E₄ | | E₄*E₅ | E_{b} |
| 932 | E_{1b}E₂E₃E₄ | | E₄*E₅ | E_{b} |
| 933 | E₁ₐE₂EᵢE₄ | | E₄*E₅ | E_{b} |
| 934 | E_{1b}E₂EᵢE₄ | | E₄*E₅ | E_{b} |
| 935 | E₁ₐE₂EᵢᵢE₄ | | E₄*E₅ | E_{b} |
| 936 | E_{1b}E₂EᵢᵢE₄ | | E₄*E₅ | E_{b} |
| 937 | E₁ₐE₂EᵢᵢE_{iib}E₄ | | E₄*E₅ | E_{b} |
| 938 | E_{1b}E₂EᵢᵢE_{iib}E₄ | | E₄*E₅ | E_{b} |
| 939 | E₁ₐE₂E₃EᵢE₄ | | E₄*E₅ | E_{b} |
| 940 | E_{1b}E₂E₃EᵢE₄ | | E₄*E₅ | E_{b} |
| 941 | E₁ₐE₂E₃EᵢᵢE₄ | | E₄*E₅ | E_{b} |
| 942 | E_{1b}E₂E₃EᵢᵢE₄ | | E₄*E₅ | E_{b} |
| 943 | E₁ₐE₂E₃EᵢᵢE_{iib}E₄ | | E₄*E₅ | E_{b} |
| 944 | E_{1b}E₂E₃EᵢᵢE_{iib}E₄ | | E₄*E₅ | E_{b} |
| 945 | E₁ₐE₂Eᵢᵢᵢ | | E₄*E₅ | E_{b} |
| 946 | E_{1b}E₂Eᵢᵢᵢ | | E₄*E₅ | E_{b} |
| 947 | E₁ₐE₂E₃Eᵢᵢᵢ | | E₄*E₅ | E_{b} |
| 948 | E_{1b}E₂E₃Eᵢᵢᵢ | | E₄*E₅ | E_{b} |
| 949 | E₁ₐE₂EᵢᵢᵢE₄ | | E₄*E₅ | E_{b} |
| 950 | E_{1b}E₂EᵢᵢᵢE₄ | | E₄*E₅ | E_{b} |
| 951 | E₁ₐE₂E₃EᵢᵢᵢE₄ | | E₄*E₅ | E_{b} |
| 952 | E_{1b}E₂E₃EᵢᵢᵢE₄ | | E₄*E₅ | E_{b} |
| 953 | E₁ₐE₂Eᵢᵥ | | E₄*E₅ | E_{b} |
| 954 | E_{1b}E₂Eᵢᵥ | | E₄*E₅ | E_{b} |
| 955 | E₁ₐE₂E₃Eᵢᵥ | | E₄*E₅ | E_{b} |
| 956 | E_{1b}E₂E₃Eᵢᵥ | | E₄*E₅ | E_{b} |
| 957 | E₁ₐE₂EᵢᵥE₄ | | E₄*E₅ | E_{b} |
| 958 | E_{1b}E₂EᵢᵥE₄ | | E₄*E₅ | E_{b} |
| 959 | E₁ₐE₂E₃EᵢᵥE₄ | | E₄*E₅ | E_{b} |
| 960 | E_{1b}E₂E₃EᵢᵥE₄ | | E₄*E₅ | E_{b} |
| 961 | E₁ₐE₂ | AlkL | | E_{b} |
| 962 | E_{1b}E₂ | AlkL | | E_{b} |
| 963 | E₁ₐE₂E₃ | AlkL | | E_{b} |
| 964 | E_{1b}E₂E₃ | AlkL | | E_{b} |
| 965 | E₁ₐE₂Eᵢ | AlkL | | E_{b} |
| 966 | E_{1b}E₂Eᵢ | AlkL | | E_{b} |
| 967 | E₁ₐE₂Eᵢᵢ | AlkL | | E_{b} |
| 968 | E_{1b}E₂Eᵢᵢ | AlkL | | E_{b} |
| 969 | E₁ₐE₂EᵢᵢE_{iib} | AlkL | | E_{b} |
| 970 | E_{1b}E₂EᵢᵢE_{iib} | AlkL | | E_{b} |
| 971 | E₁ₐE₂E₃Eᵢ | AlkL | | E_{b} |
| 972 | E_{1b}E₂E₃Eᵢ | AlkL | | E_{b} |
| 973 | E₁ₐE₂E₃Eᵢᵢ | AlkL | | E_{b} |
| 974 | E_{1b}E₂E₃Eᵢᵢ | AlkL | | E_{b} |
| 975 | E₁ₐE₂E₃EᵢᵢE_{iib} | AlkL | | E_{b} |
| 976 | E_{1b}E₂E₃EᵢᵢE_{iib} | AlkL | | E_{b} |
| 977 | E₁ₐE₂E₄ | AlkL | | E_{b} |
| 978 | E_{1b}E₂E₄ | AlkL | | E_{b} |
| 979 | E₁ₐE₂E₃E₄ | AlkL | | E_{b} |
| 980 | E_{1b}E₂E₃E₄ | AlkL | | E_{b} |
| 981 | E₁ₐE₂EᵢE₄ | AlkL | | E_{b} |
| 982 | E_{1b}E₂EᵢE₄ | AlkL | | E_{b} |
| 983 | E₁ₐE₂EᵢᵢE₄ | AlkL | | E_{b} |
| 984 | E_{1b}E₂EᵢᵢE₄ | AlkL | | E_{b} |
| 985 | E₁ₐE₂EᵢᵢE_{iib}E₄ | AlkL | | E_{b} |
| 986 | E_{1b}E₂EᵢᵢE_{iib}E₄ | AlkL | | E_{b} |
| 987 | E₁ₐE₂E₃EᵢE₄ | AlkL | | E_{b} |
| 988 | E_{1b}E₂E₃EᵢE₄ | AlkL | | E_{b} |
| 989 | E₁ₐE₂E₃EᵢᵢE₄ | AlkL | | E_{b} |
| 990 | E_{1b}E₂E₃EᵢᵢE₄ | AlkL | | E_{b} |
| 991 | E₁ₐE₂E₃EᵢᵢE_{iib}E₄ | AlkL | | E_{b} |
| 992 | E_{1b}E₂E₃EᵢᵢE_{iib}E₄ | AlkL | | E_{b} |
| 993 | E₁ₐE₂Eᵢᵢᵢ | AlkL | | E_{b} |
| 994 | E_{1b}E₂Eᵢᵢᵢ | AlkL | | E_{b} |
| 995 | E₁ₐE₂E₃Eᵢᵢᵢ | AlkL | | E_{b} |
| 996 | E_{1b}E₂E₃Eᵢᵢᵢ | AlkL | | E_{b} |
| 997 | E₁ₐE₂EᵢᵢᵢE₄ | AlkL | | E_{b} |
| 998 | E_{1b}E₂EᵢᵢᵢE₄ | AlkL | | E_{b} |
| 999 | E₁ₐE₂E₃EᵢᵢᵢE₄ | AlkL | | E_{b} |
| 1000 | E_{1b}E₂E₃EᵢᵢᵢE₄ | AlkL | | E_{b} |
| 1001 | E₁ₐE₂Eᵢᵥ | AlkL | | E_{b} |
| 1002 | E_{1b}E₂Eᵢᵥ | AlkL | | E_{b} |
| 1003 | E₁ₐE₂E₃Eᵢᵥ | AlkL | | E_{b} |
| 1004 | E_{1b}E₂E₃Eᵢᵥ | AlkL | | E_{b} |
| 1005 | E₁ₐE₂EᵢᵥE₄ | AlkL | | E_{b} |
| 1006 | E_{1b}E₂EᵢᵥE₄ | AlkL | | E_{b} |
| 1007 | E₁ₐE₂E₃EᵢᵥE₄ | AlkL | | E_{b} |
| 1008 | E_{1b}E₂E₃EᵢᵥE₄ | AlkL | | E_{b} |
| 1009 | E₁ₐE₂ | AlkL | E₄* | E_{b} |
| 1010 | E_{1b}E₂ | AlkL | E₄* | E_{b} |
| 1011 | E₁ₐE₂E₃ | AlkL | E₄* | E_{b} |
| 1012 | E_{1b}E₂E₃ | AlkL | E₄* | E_{b} |
| 1013 | E₁ₐE₂Eᵢ | AlkL | E₄* | E_{b} |
| 1014 | E_{1b}E₂Eᵢ | AlkL | E₄* | E_{b} |
| 1015 | E₁ₐE₂Eᵢᵢ | AlkL | E₄* | E_{b} |
| 1016 | E_{1b}E₂Eᵢᵢ | AlkL | E₄* | E_{b} |
| 1017 | E₁ₐE₂EᵢᵢE_{iib} | AlkL | E₄* | E_{b} |
| 1018 | E_{1b}E₂EᵢᵢE_{iib} | AlkL | E₄* | E_{b} |
| 1019 | E₁ₐE₂E₃Eᵢ | AlkL | E₄* | E_{b} |
| 1020 | E_{1b}E₂E₃Eᵢ | AlkL | E₄* | E_{b} |
| 1021 | E₁ₐE₂E₃Eᵢᵢ | AlkL | E₄* | E_{b} |
| 1022 | E_{1b}E₂E₃Eᵢᵢ | AlkL | E₄* | E_{b} |
| 1023 | E₁ₐE₂E₃EᵢᵢE_{iib} | AlkL | E₄* | E_{b} |
| 1024 | E_{1b}E₂E₃EᵢᵢE_{iib} | AlkL | E₄* | E_{b} |
| 1025 | E₁ₐE₂E₄ | AlkL | E₄* | E_{b} |
| 1026 | E_{1b}E₂E₄ | AlkL | E₄* | E_{b} |
| 1027 | E₁ₐE₂E₃E₄ | AlkL | E₄* | E_{b} |
| 1028 | E_{1b}E₂E₃E₄ | AlkL | E₄* | E_{b} |
| 1029 | E₁ₐE₂EᵢE₄ | AlkL | E₄* | E_{b} |
| 1030 | E_{1b}E₂EᵢE₄ | AlkL | E₄* | E_{b} |
| 1031 | E₁ₐE₂EᵢᵢE₄ | AlkL | E₄* | E_{b} |
| 1032 | E_{1b}E₂EᵢᵢE₄ | AlkL | E₄* | E_{b} |
| 1033 | E₁ₐE₂EᵢᵢE_{iib}E₄ | AlkL | E₄* | E_{b} |
| 1034 | E_{1b}E₂EᵢᵢE_{iib}E₄ | AlkL | E₄* | E_{b} |
| 1035 | E₁ₐE₂E₃EᵢE₄ | AlkL | E₄* | E_{b} |
| 1036 | E_{1b}E₂E₃EᵢE₄ | AlkL | E₄* | E_{b} |
| 1037 | E₁ₐE₂E₃EᵢᵢE₄ | AlkL | E₄* | E_{b} |
| 1038 | E_{1b}E₂E₃EᵢᵢE₄ | AlkL | E₄* | E_{b} |
| 1039 | E₁ₐE₂E₃EᵢᵢE_{iib}E₄ | AlkL | E₄* | E_{b} |
| 1040 | E_{1b}E₂E₃EᵢᵢE_{iib}E₄ | AlkL | E₄* | E_{b} |
| 1041 | E₁ₐE₂Eᵢᵢᵢ | AlkL | E₄* | E_{b} |
| 1042 | E_{1b}E₂Eᵢᵢᵢ | AlkL | E₄* | E_{b} |
| 1043 | E₁ₐE₂E₃Eᵢᵢᵢ | AlkL | E₄* | E_{b} |
| 1044 | E_{1b}E₂E₃Eᵢᵢᵢ | AlkL | E₄* | E_{b} |
| 1045 | E₁ₐE₂EᵢᵢᵢE₄ | AlkL | E₄* | E_{b} |
| 1046 | E_{1b}E₂EᵢᵢᵢE₄ | AlkL | E₄* | E_{b} |
| 1047 | E₁ₐE₂E₃EᵢᵢᵢE₄ | AlkL | E₄* | E_{b} |
| 1048 | E_{1b}E₂E₃EᵢᵢᵢE₄ | AlkL | E₄* | E_{b} |
| 1049 | E₁ₐE₂Eᵢᵥ | AlkL | E₄* | E_{b} |
| 1050 | E_{1b}E₂Eᵢᵥ | AlkL | E₄* | E_{b} |
| 1051 | E₁ₐE₂E₃Eᵢᵥ | AlkL | E₄* | E_{b} |
| 1052 | E_{1b}E₂E₃Eᵢᵥ | AlkL | E₄* | E_{b} |
| 1053 | E₁ₐE₂EᵢᵥE₄ | AlkL | E₄* | E_{b} |
| 1054 | E_{1b}E₂EᵢᵥE₄ | AlkL | E₄* | E_{b} |
| 1055 | E₁ₐE₂E₃EᵢᵥE₄ | AlkL | E₄* | E_{b} |
| 1056 | E_{1b}E₂E₃EᵢᵥE₄ | AlkL | E₄* | E_{b} |
| 1057 | E₁ₐE₂ | AlkL | E₅ | E_{b} |
| 1058 | E_{1b}E₂ | AlkL | E₅ | E_{b} |
| 1059 | E₁ₐE₂E₃ | AlkL | E₅ | E_{b} |
| 1060 | E_{1b}E₂E₃ | AlkL | E₅ | E_{b} |
| 1061 | E₁ₐE₂Eᵢ | AlkL | E₅ | E_{b} |
| 1062 | E_{1b}E₂Eᵢ | AlkL | E₅ | E_{b} |
| 1063 | E₁ₐE₂Eᵢᵢ | AlkL | E₅ | E_{b} |
| 1064 | E_{1b}E₂Eᵢᵢ | AlkL | E₅ | E_{b} |
| 1065 | E₁ₐE₂EᵢᵢE_{iib} | AlkL | E₅ | E_{b} |
| 1066 | E_{1b}E₂EᵢᵢE_{iib} | AlkL | E₅ | E_{b} |
| 1067 | E₁ₐE₂E₃Eᵢ | AlkL | E₅ | E_{b} |
| 1068 | E_{1b}E₂E₃Eᵢ | AlkL | E₅ | E_{b} |
| 1069 | E₁ₐE₂E₃Eᵢᵢ | AlkL | E₅ | E_{b} |
| 1070 | E_{1b}E₂E₃Eᵢᵢ | AlkL | E₅ | E_{b} |
| 1071 | E₁ₐE₂E₃EᵢᵢE_{iib} | AlkL | E₅ | E_{b} |
| 1072 | E_{1b}E₂E₃EᵢᵢE_{iib} | AlkL | E₅ | E_{b} |
| 1073 | E₁ₐE₂E₄ | AlkL | E₅ | E_{b} |
| 1074 | E_{1b}E₂E₄ | AlkL | E₅ | E_{b} |
| 1075 | E₁ₐE₂E₃E₄ | AlkL | E₅ | E_{b} |
| 1076 | E_{1b}E₂E₃E₄ | AlkL | E₅ | E_{b} |
| 1077 | E₁ₐE₂EᵢE₄ | AlkL | E₅ | E_{b} |
| 1078 | E_{1b}E₂EᵢE₄ | AlkL | E₅ | E_{b} |
| 1079 | E₁ₐE₂EᵢᵢE₄ | AlkL | E₅ | E_{b} |
| 1080 | E_{1b}E₂EᵢᵢE₄ | AlkL | E₅ | E_{b} |
| 1081 | E₁ₐE₂EᵢᵢE_{iib}E₄ | AlkL | E₅ | E_{b} |
| 1082 | E_{1b}E₂EᵢᵢE_{iib}E₄ | AlkL | E₅ | E_{b} |
| 1083 | E₁ₐE₂E₃EᵢE₄ | AlkL | E₅ | E_{b} |
| 1084 | E_{1b}E₂E₃EᵢE₄ | AlkL | E₅ | E_{b} |
| 1085 | E₁ₐE₂E₃EᵢᵢE₄ | AlkL | E₅ | E_{b} |
| 1086 | E_{1b}E₂E₃EᵢᵢE₄ | AlkL | E₅ | E_{b} |
| 1087 | E₁ₐE₂E₃EᵢᵢE_{iib}E₄ | AlkL | E₅ | E_{b} |
| 1088 | E_{1b}E₂E₃EᵢᵢE_{iib}E₄ | AlkL | E₅ | E_{b} |
| 1089 | E₁ₐE₂Eᵢᵢᵢ | AlkL | E₅ | E_{b} |
| 1090 | E_{1b}E₂Eᵢᵢᵢ | AlkL | E₅ | E_{b} |
| 1091 | E₁ₐE₂E₃Eᵢᵢᵢ | AlkL | E₅ | E_{b} |
| 1092 | E_{1b}E₂E₃Eᵢᵢᵢ | AlkL | E₅ | E_{b} |
| 1093 | E₁ₐE₂EᵢᵢᵢE₄ | AlkL | E₅ | E_{b} |
| 1094 | E_{1b}E₂EᵢᵢᵢE₄ | AlkL | E₅ | E_{b} |
| 1095 | E₁ₐE₂E₃EᵢᵢᵢE₄ | AlkL | E₅ | E_{b} |
| 1096 | E_{1b}E₂E₃EᵢᵢᵢE₄ | AlkL | E₅ | E_{b} |
| 1097 | E₁ₐE₂Eᵢᵥ | AlkL | E₅ | E_{b} |
| 1098 | E_{1b}E₂Eᵢᵥ | AlkL | E₅ | E_{b} |
| 1099 | E₁ₐE₂E₃Eᵢᵥ | AlkL | E₅ | E_{b} |
| 1100 | E_{1b}E₂E₃Eᵢᵥ | AlkL | E₅ | E_{b} |
| 1101 | E₁ₐE₂EᵢᵥE₄ | AlkL | E₅ | E_{b} |
| 1102 | E_{1b}E₂EᵢᵥE₄ | AlkL | E₅ | E_{b} |
| 1103 | E₁ₐE₂E₃EᵢᵥE₄ | AlkL | E₅ | E_{b} |
| 1104 | E_{1b}E₂E₃EᵢᵥE₄ | AlkL | E₅ | E_{b} |
| 1105 | E₁ₐE₂ | AlkL | E₄*E₅ | E_{b} |
| 1106 | E_{1b}E₂ | AlkL | E₄*E₅ | E_{b} |
| 1107 | E₁ₐE₂E₃ | AlkL | E₄*E₅ | E_{b} |
| 1108 | E_{1b}E₂E₃ | AlkL | E₄*E₅ | E_{b} |
| 1109 | E₁ₐE₂Eᵢ | AlkL | E₄*E₅ | E_{b} |
| 1110 | E_{1b}E₂Eᵢ | AlkL | E₄*E₅ | E_{b} |
| 1111 | E₁ₐE₂Eᵢᵢ | AlkL | E₄*E₅ | E_{b} |
| 1112 | E_{1b}E₂Eᵢᵢ | AlkL | E₄*E₅ | E_{b} |
| 1113 | E₁ₐE₂EᵢᵢE_{iib} | AlkL | E₄*E₅ | E_{b} |
| 1114 | E_{1b}E₂EᵢᵢE_{iib} | AlkL | E₄*E₅ | E_{b} |
| 1115 | E₁ₐE₂E₃Eᵢ | AlkL | E₄*E₅ | E_{b} |
| 1116 | E_{1b}E₂E₃Eᵢ | AlkL | E₄*E₅ | E_{b} |
| 1117 | E₁ₐE₂E₃Eᵢᵢ | AlkL | E₄*E₅ | E_{b} |
| 1118 | E_{1b}E₂E₃Eᵢᵢ | AlkL | E₄*E₅ | E_{b} |
| 1119 | E₁ₐE₂E₃EᵢᵢE_{iib} | AlkL | E₄*E₅ | E_{b} |
| 1120 | E_{1b}E₂E₃EᵢᵢE_{iib} | AlkL | E₄*E₅ | E_{b} |
| 1121 | E₁ₐE₂E₄ | AlkL | E₄*E₅ | E_{b} |
| 1122 | E_{1b}E₂E₄ | AlkL | E₄*E₅ | E_{b} |
| 1123 | E₁ₐE₂E₃E₄ | AlkL | E₄*E₅ | E_{b} |
| 1124 | E_{1b}E₂E₃E₄ | AlkL | E₄*E₅ | E_{b} |
| 1125 | E₁ₐE₂EᵢE₄ | AlkL | E₄*E₅ | E_{b} |
| 1126 | E_{1b}E₂EᵢE₄ | AlkL | E₄*E₅ | E_{b} |
| 1127 | E₁ₐE₂EᵢᵢE₄ | AlkL | E₄*E₅ | E_{b} |
| 1128 | E_{1b}E₂EᵢᵢE₄ | AlkL | E₄*E₅ | E_{b} |
| 1129 | E₁ₐE₂EᵢᵢE_{iib}E₄ | AlkL | E₄*E₅ | E_{b} |
| 1130 | E_{1b}E₂EᵢᵢE_{iib}E₄ | AlkL | E₄*E₅ | E_{b} |
| 1131 | E₁ₐE₂E₃EᵢE₄ | AlkL | E₄*E₅ | E_{b} |
| 1132 | E_{1b}E₂E₃EᵢE₄ | AlkL | E₄*E₅ | E_{b} |
| 1133 | E₁ₐE₂E₃EᵢᵢE₄ | AlkL | E₄*E₅ | E_{b} |
| 1134 | E_{1b}E₂E₃EᵢᵢE₄ | AlkL | E₄*E₅ | E_{b} |
| 1135 | E₁ₐE₂E₃EᵢᵢE_{iib}E₄ | AlkL | E₄*E₅ | E_{b} |
| 1136 | E_{1b}E₂E₃EᵢᵢE_{iib}E₄ | AlkL | E₄*E₅ | E_{b} |
| 1137 | E₁ₐE₂Eᵢᵢᵢ | AlkL | E₄*E₅ | E_{b} |
| 1138 | E_{1b}E₂Eᵢᵢᵢ | AlkL | E₄*E₅ | E_{b} |
| 1139 | E₁ₐE₂E₃Eᵢᵢᵢ | AlkL | E₄*E₅ | E_{b} |
| 1140 | E_{1b}E₂E₃Eᵢᵢᵢ | AlkL | E₄*E₅ | E_{b} |
| 1141 | E₁ₐE₂EᵢᵢᵢE₄ | AlkL | E₄*E₅ | E_{b} |
| 1142 | E_{1b}E₂EᵢᵢᵢE₄ | AlkL | E₄*E₅ | E_{b} |
| 1143 | E₁ₐE₂E₃EᵢᵢᵢE₄ | AlkL | E₄*E₅ | E_{b} |
| 1144 | E_{1b}E₂E₃EᵢᵢᵢE₄ | AlkL | E₄*E₅ | E_{b} |
| 1145 | E₁ₐE₂Eᵢᵥ | AlkL | E₄*E₅ | E_{b} |
| 1146 | E_{1b}E₂Eᵢᵥ | AlkL | E₄*E₅ | E_{b} |
| 1147 | E₁ₐE₂E₃Eᵢᵥ | AlkL | E₄*E₅ | E_{b} |
| 1148 | E_{1b}E₂E₃Eᵢᵥ | AlkL | E₄*E₅ | E_{b} |
| 1149 | E₁ₐE₂EᵢᵥE₄ | AlkL | E₄*E₅ | E_{b} |
| 1150 | E_{1b}E₂EᵢᵥE₄ | AlkL | E₄*E₅ | E_{b} |
| 1151 | E₁ₐE₂E₃EᵢᵥE₄ | AlkL | E₄*E₅ | E_{b} |
| 1152 | E_{1b}E₂E₃EᵢᵥE₄ | AlkL | E₄*E₅ | E_{b} |
| 1153 | E₁ₐE₂ | | | E_{d} |
| 1154 | E_{1b}E₂ | | | E_{d} |
| 1155 | E₁ₐE₂E₃ | | | E_{d} |
| 1156 | E_{1b}E₂E₃ | | | E_{d} |
| 1157 | E₁ₐE₂Eᵢ | | | E_{d} |
| 1158 | E_{1b}E₂Eᵢ | | | E_{d} |
| 1159 | E₁ₐE₂Eᵢᵢ | | | E_{d} |
| 1160 | E_{1b}E₂Eᵢᵢ | | | E_{d} |
| 1161 | E₁ₐE₂EᵢᵢE_{iib} | | | E_{d} |
| 1162 | E_{1b}E₂EᵢᵢE_{iib} | | | E_{d} |
| 1163 | E₁ₐE₂E₃Eᵢ | | | E_{d} |
| 1164 | E_{1b}E₂E₃Eᵢ | | | E_{d} |
| 1165 | E₁ₐE₂E₃Eᵢᵢ | | | E_{d} |
| 1166 | E_{1b}E₂E₃Eᵢᵢ | | | E_{d} |
| 1167 | E₁ₐE₂E₃EᵢᵢE_{iib} | | | E_{d} |
| 1168 | E_{1b}E₂E₃EᵢᵢE_{iib} | | | E_{d} |
| 1169 | E₁ₐE₂E₄ | | | E_{d} |
| 1170 | E_{1b}E₂E₄ | | | E_{d} |
| 1171 | E₁ₐE₂E₃E₄ | | | E_{d} |
| 1172 | E_{1b}E₂E₃E₄ | | | E_{d} |
| 1173 | E₁ₐE₂EᵢE₄ | | | E_{d} |
| 1174 | E_{1b}E₂EᵢE₄ | | | E_{d} |
| 1175 | E₁ₐE₂EᵢᵢE₄ | | | E_{d} |
| 1176 | E_{1b}E₂EᵢᵢE₄ | | | E_{d} |
| 1177 | E₁ₐE₂EᵢᵢE_{iib}E₄ | | | E_{d} |
| 1178 | E_{1b}E₂EᵢᵢE_{iib}E₄ | | | E_{d} |
| 1179 | E₁ₐE₂E₃EᵢE₄ | | | E_{d} |
| 1180 | E_{1b}E₂E₃EᵢE₄ | | | E_{d} |
| 1181 | E₁ₐE₂E₃EᵢᵢE₄ | | | E_{d} |
| 1182 | E_{1b}E₂E₃EᵢᵢE₄ | | | E_{d} |
| 1183 | E₁ₐE₂E₃EᵢᵢE_{iib}E₄ | | | E_{d} |
| 1184 | E_{1b}E₂E₃EᵢᵢE_{iib}E₄ | | | E_{d} |
| 1185 | E₁ₐE₂Eᵢᵢᵢ | | | E_{d} |
| 1186 | E_{1b}E₂Eᵢᵢᵢ | | | E_{d} |
| 1187 | E₁ₐE₂E₃Eᵢᵢᵢ | | | E_{d} |
| 1188 | E_{1b}E₂E₃Eᵢᵢᵢ | | | E_{d} |
| 1189 | E₁ₐE₂EᵢᵢᵢE₄ | | | E_{d} |
| 1190 | E_{1b}E₂EᵢᵢᵢE₄ | | | E_{d} |
| 1191 | E₁ₐE₂E₃EᵢᵢᵢE₄ | | | E_{d} |
| 1192 | E_{1b}E₂E₃EᵢᵢᵢE₄ | | | E_{d} |
| 1193 | E₁ₐE₂Eᵢᵥ | | | E_{d} |
| 1194 | E_{1b}E₂Eᵢᵥ | | | E_{d} |
| 1195 | E₁ₐE₂E₃Eᵢᵥ | | | E_{d} |
| 1196 | E_{1b}E₂E₃Eᵢᵥ | | | E_{d} |
| 1197 | E₁ₐE₂EᵢᵥE₄ | | | E_{d} |
| 1198 | E_{1b}E₂EᵢᵥE₄ | | | E_{d} |
| 1199 | E₁ₐE₂E₃EᵢᵥE₄ | | | E_{d} |
| 1200 | E_{1b}E₂E₃EᵢᵥE₄ | | | E_{d} |
| 1201 | E₁ₐE₂ | | E₄* | E_{d} |
| 1202 | E_{1b}E₂ | | E₄* | E_{d} |
| 1203 | E₁ₐE₂E₃ | | E₄* | E_{d} |
| 1204 | E_{1b}E₂E₃ | | E₄* | E_{d} |
| 1205 | E₁ₐE₂Eᵢ | | E₄* | E_{d} |
| 1206 | E_{1b}E₂Eᵢ | | E₄* | E_{d} |
| 1207 | E₁ₐE₂Eᵢᵢ | | E₄* | E_{d} |
| 1208 | E_{1b}E₂Eᵢᵢ | | E₄* | E_{d} |
| 1209 | E₁ₐE₂EᵢᵢE_{iib} | | E₄* | E_{d} |
| 1210 | E_{1b}E₂EᵢᵢE_{iib} | | E₄* | E_{d} |
| 1211 | E₁ₐE₂E₃Eᵢ | | E₄* | E_{d} |
| 1212 | E_{1b}E₂E₃Eᵢ | | E₄* | E_{d} |
| 1213 | E₁ₐE₂E₃Eᵢᵢ | | E₄* | E_{d} |
| 1214 | E_{1b}E₂E₃Eᵢᵢ | | E₄* | E_{d} |
| 1215 | E₁ₐE₂E₃EᵢᵢE_{iib} | | E₄* | E_{d} |
| 1216 | E_{1b}E₂E₃EᵢᵢE_{iib} | | E₄* | E_{d} |
| 1217 | E₁ₐE₂E₄ | | E₄* | E_{d} |
| 1218 | E_{1b}E₂E₄ | | E₄* | E_{d} |
| 1219 | E₁ₐE₂E₃E₄ | | E₄* | E_{d} |
| 1220 | E_{1b}E₂E₃E₄ | | E₄* | E_{d} |
| 1221 | E₁ₐE₂EᵢE₄ | | E₄* | E_{d} |
| 1222 | E_{1b}E₂EᵢE₄ | | E₄* | E_{d} |
| 1223 | E₁ₐE₂EᵢᵢE₄ | | E₄* | E_{d} |
| 1224 | E_{1b}E₂EᵢᵢE₄ | | E₄* | E_{d} |
| 1225 | E₁ₐE₂EᵢᵢE_{iib}E₄ | | E₄* | E_{d} |
| 1226 | E_{1b}E₂EᵢᵢE_{iib}E₄ | | E₄* | E_{d} |
| 1227 | E₁ₐE₂E₃EᵢE₄ | | E₄* | E_{d} |
| 1228 | E_{1b}E₂E₃EᵢE₄ | | E₄* | E_{d} |
| 1229 | E₁ₐE₂E₃EᵢᵢE₄ | | E₄* | E_{d} |
| 1230 | E_{1b}E₂E₃EᵢᵢE₄ | | E₄* | E_{d} |
| 1231 | E₁ₐE₂E₃EᵢᵢE_{iib}E₄ | | E₄* | E_{d} |
| 1232 | E_{1b}E₂E₃EᵢᵢE_{iib}E₄ | | E₄* | E_{d} |
| 1233 | E₁ₐE₂Eᵢᵢᵢ | | E₄* | E_{d} |
| 1234 | E_{1b}E₂Eᵢᵢᵢ | | E₄* | E_{d} |
| 1235 | E₁ₐE₂E₃Eᵢᵢᵢ | | E₄* | E_{d} |
| 1236 | E_{1b}E₂E₃Eᵢᵢᵢ | | E₄* | E_{d} |
| 1237 | E₁ₐE₂EᵢᵢᵢE₄ | | E₄* | E_{d} |
| 1238 | E_{1b}E₂EᵢᵢᵢE₄ | | E₄* | E_{d} |
| 1239 | E₁ₐE₂E₃EᵢᵢᵢE₄ | | E₄* | E_{d} |
| 1240 | E_{1b}E₂E₃EᵢᵢᵢE₄ | | E₄* | E_{d} |
| 1241 | E₁ₐE₂Eᵢᵥ | | E₄* | E_{d} |
| 1242 | E_{1b}E₂Eᵢᵥ | | E₄* | E_{d} |
| 1243 | E₁ₐE₂E₃Eᵢᵥ | | E₄* | E_{d} |
| 1244 | E_{1b}E₂E₃Eᵢᵥ | | E₄* | E_{d} |
| 1245 | E₁ₐE₂EᵢᵥE₄ | | E₄* | E_{d} |
| 1246 | E_{1b}E₂EᵢᵥE₄ | | E₄* | E_{d} |
| 1247 | E₁ₐE₂E₃EᵢᵥE₄ | | E₄* | E_{d} |
| 1248 | E_{1b}E₂E₃EᵢᵥE₄ | | E₄* | E_{d} |
| 1249 | E₁ₐE₂ | | E₅ | E_{d} |
| 1250 | E_{1b}E₂ | | E₅ | E_{d} |
| 1251 | E₁ₐE₂E₃ | | E₅ | E_{d} |
| 1252 | E_{1b}E₂E₃ | | E₅ | E_{d} |
| 1253 | E₁ₐE₂Eᵢ | | E₅ | E_{d} |
| 1254 | E_{1b}E₂Eᵢ | | E₅ | E_{d} |
| 1255 | E₁ₐE₂Eᵢᵢ | | E₅ | E_{d} |
| 1256 | E_{1b}E₂Eᵢᵢ | | E₅ | E_{d} |
| 1257 | E₁ₐE₂EᵢᵢE_{iib} | | E₅ | E_{d} |
| 1258 | E_{1b}E₂EᵢᵢE_{iib} | | E₅ | E_{d} |
| 1259 | E₁ₐE₂E₃Eᵢ | | E₅ | E_{d} |
| 1260 | E_{1b}E₂E₃Eᵢ | | E₅ | E_{d} |
| 1261 | E₁ₐE₂E₃Eᵢᵢ | | E₅ | E_{d} |
| 1262 | E_{1b}E₂E₃Eᵢᵢ | | E₅ | E_{d} |
| 1263 | E₁ₐE₂E₃EᵢᵢE_{iib} | | E₅ | E_{d} |
| 1264 | E_{1b}E₂E₃EᵢᵢE_{iib} | | E₅ | E_{d} |
| 1265 | E₁ₐE₂E₄ | | E₅ | E_{d} |
| 1266 | E_{1b}E₂E₄ | | E₅ | E_{d} |
| 1267 | E₁ₐE₂E₃E₄ | | E₅ | E_{d} |
| 1268 | E_{1b}E₂E₃E₄ | | E₅ | E_{d} |
| 1269 | E₁ₐE₂EᵢE₄ | | E₅ | E_{d} |
| 1270 | E_{1b}E₂EᵢE₄ | | E₅ | E_{d} |
| 1271 | E₁ₐE₂EᵢᵢE₄ | | E₅ | E_{d} |
| 1272 | E_{1b}E₂EᵢᵢE₄ | | E₅ | E_{d} |
| 1273 | E₁ₐE₂EᵢᵢE_{iib}E₄ | | E₅ | E_{d} |
| 1274 | E_{1b}E₂EᵢᵢE_{iib}E₄ | | E₅ | E_{d} |
| 1275 | E₁ₐE₂E₃EᵢE₄ | | E₅ | E_{d} |
| 1276 | E_{1b}E₂E₃EᵢE₄ | | E₅ | E_{d} |
| 1277 | E₁ₐE₂E₃EᵢᵢE₄ | | E₅ | E_{d} |
| 1278 | E_{1b}E₂E₃EᵢᵢE₄ | | E₅ | E_{d} |
| 1279 | E₁ₐE₂E₃EᵢᵢE_{iib}E₄ | | E₅ | E_{d} |
| 1280 | E_{1b}E₂E₃EᵢᵢE_{iib}E₄ | | E₅ | E_{d} |
| 1281 | E₁ₐE₂Eᵢᵢᵢ | | E₅ | E_{d} |
| 1282 | E_{1b}E₂Eᵢᵢᵢ | | E₅ | E_{d} |
| 1283 | E₁ₐE₂E₃Eᵢᵢᵢ | | E₅ | E_{d} |
| 1284 | E_{1b}E₂E₃Eᵢᵢᵢ | | E₅ | E_{d} |
| 1285 | E₁ₐE₂EᵢᵢᵢE₄ | | E₅ | E_{d} |
| 1286 | E_{1b}E₂EᵢᵢᵢE₄ | | E₅ | E_{d} |
| 1287 | E₁ₐE₂E₃EᵢᵢᵢE₄ | | E₅ | E_{d} |
| 1288 | E_{1b}E₂E₃EᵢᵢᵢE₄ | | E₅ | E_{d} |
| 1289 | E₁ₐE₂Eᵢᵥ | | E₅ | E_{d} |
| 1290 | E_{1b}E₂Eᵢᵥ | | E₅ | E_{d} |
| 1291 | E₁ₐE₂E₃Eᵢᵥ | | E₅ | E_{d} |
| 1292 | E_{1b}E₂E₃Eᵢᵥ | | E₅ | E_{d} |
| 1293 | E₁ₐE₂EᵢᵥE₄ | | E₅ | E_{d} |
| 1294 | E_{1b}E₂EᵢᵥE₄ | | E₅ | E_{d} |
| 1295 | E₁ₐE₂E₃EᵢᵥE₄ | | E₅ | E_{d} |
| 1296 | E_{1b}E₂E₃EᵢᵥE₄ | | E₅ | E_{d} |
| 1297 | E₁ₐE₂ | | E₄*E₅ | E_{d} |
| 1298 | E_{1b}E₂ | | E₄*E₅ | E_{d} |
| 1299 | E₁ₐE₂E₃ | | E₄*E₅ | E_{d} |
| 1300 | E_{1b}E₂E₃ | | E₄*E₅ | E_{d} |
| 1301 | E₁ₐE₂Eᵢ | | E₄*E₅ | E_{d} |
| 1302 | E_{1b}E₂Eᵢ | | E₄*E₅ | E_{d} |
| 1303 | E₁ₐE₂Eᵢᵢ | | E₄*E₅ | E_{d} |
| 1304 | E_{1b}E₂Eᵢᵢ | | E₄*E₅ | E_{d} |
| 1305 | E₁ₐE₂EᵢᵢE_{iib} | | E₄*E₅ | E_{d} |
| 1306 | E_{1b}E₂EᵢᵢE_{iib} | | E₄*E₅ | E_{d} |
| 1307 | E₁ₐE₂E₃Eᵢ | | E₄*E₅ | E_{d} |
| 1308 | E_{1b}E₂E₃Eᵢ | | E₄*E₅ | E_{d} |
| 1309 | E₁ₐE₂E₃Eᵢᵢ | | E₄*E₅ | E_{d} |
| 1310 | E_{1b}E₂E₃Eᵢᵢ | | E₄*E₅ | E_{d} |
| 1311 | E₁ₐE₂E₃EᵢᵢE_{iib} | | E₄*E₅ | E_{d} |
| 1312 | E_{1b}E₂E₃EᵢᵢE_{iib} | | E₄*E₅ | E_{d} |
| 1313 | E₁ₐE₂E₄ | | E₄*E₅ | E_{d} |
| 1314 | E_{1b}E₂E₄ | | E₄*E₅ | E_{d} |
| 1315 | E₁ₐE₂E₃E₄ | | E₄*E₅ | E_{d} |
| 1316 | E_{1b}E₂E₃E₄ | | E₄*E₅ | E_{d} |
| 1317 | E₁ₐE₂EᵢE₄ | | E₄*E₅ | E_{d} |
| 1318 | E_{1b}E₂EᵢE₄ | | E₄*E₅ | E_{d} |
| 1319 | E₁ₐE₂EᵢᵢE₄ | | E₄*E₅ | E_{d} |
| 1320 | E_{1b}E₂EᵢᵢE₄ | | E₄*E₅ | E_{d} |
| 1321 | E₁ₐE₂EᵢᵢE_{iib}E₄ | | E₄*E₅ | E_{d} |
| 1322 | E_{1b}E₂EᵢᵢE_{iib}E₄ | | E₄*E₅ | E_{d} |
| 1323 | E₁ₐE₂E₃EᵢE₄ | | E₄*E₅ | E_{d} |
| 1324 | E_{1b}E₂E₃EᵢE₄ | | E₄*E₅ | E_{d} |
| 1325 | E₁ₐE₂E₃EᵢᵢE₄ | | E₄*E₅ | E_{d} |
| 1326 | E_{1b}E₂E₃EᵢᵢE₄ | | E₄*E₅ | E_{d} |
| 1327 | E₁ₐE₂E₃EᵢᵢE_{iib}E₄ | | E₄*E₅ | E_{d} |
| 1328 | E_{1b}E₂E₃EᵢᵢE_{iib}E₄ | | E₄*E₅ | E_{d} |
| 1329 | E₁ₐE₂Eᵢᵢᵢ | | E₄*E₅ | E_{d} |
| 1330 | E_{1b}E₂Eᵢᵢᵢ | | E₄*E₅ | E_{d} |
| 1331 | E₁ₐE₂E₃Eᵢᵢᵢ | | E₄*E₅ | E_{d} |
| 1332 | E_{1b}E₂E₃Eᵢᵢᵢ | | E₄*E₅ | E_{d} |
| 1333 | E₁ₐE₂EᵢᵢᵢE₄ | | E₄*E₅ | E_{d} |
| 1334 | E_{1b}E₂EᵢᵢᵢE₄ | | E₄*E₅ | E_{d} |
| 1335 | E₁ₐE₂E₃EᵢᵢᵢE₄ | | E₄*E₅ | E_{d} |
| 1336 | E_{1b}E₂E₃EᵢᵢᵢE₄ | | E₄*E₅ | E_{d} |
| 1337 | E₁ₐE₂Eᵢᵥ | | E₄*E₅ | E_{d} |
| 1338 | E_{1b}E₂Eᵢᵥ | | E₄*E₅ | E_{d} |
| 1339 | E₁ₐE₂E₃Eᵢᵥ | | E₄*E₅ | E_{d} |
| 1340 | E_{1b}E₂E₃Eᵢᵥ | | E₄*E₅ | E_{d} |
| 1341 | E₁ₐE₂EᵢᵥE₄ | | E₄*E₅ | E_{d} |
| 1342 | E_{1b}E₂EᵢᵥE₄ | | E₄*E₅ | E_{d} |
| 1343 | E₁ₐE₂E₃EᵢᵥE₄ | | E₄*E₅ | E_{d} |
| 1344 | E_{1b}E₂E₃EᵢᵥE₄ | | E₄*E₅ | E_{d} |
| 1345 | E₁ₐE₂ | AlkL | | E_{d} |
| 1346 | E_{1b}E₂ | AlkL | | E_{d} |
| 1347 | E₁ₐE₂E₃ | AlkL | | E_{d} |
| 1348 | E_{1b}E₂E₃ | AlkL | | E_{d} |
| 1349 | E₁ₐE₂Eᵢ | AlkL | | E_{d} |
| 1350 | E_{1b}E₂Eᵢ | AlkL | | E_{d} |
| 1351 | E₁ₐE₂Eᵢᵢ | AlkL | | E_{d} |
| 1352 | E_{1b}E₂Eᵢᵢ | AlkL | | E_{d} |
| 1353 | E₁ₐE₂EᵢᵢE_{iib} | AlkL | | E_{d} |
| 1354 | E_{1b}E₂EᵢᵢE_{iib} | AlkL | | E_{d} |
| 1355 | E₁ₐE₂E₃Eᵢ | AlkL | | E_{d} |
| 1356 | E_{1b}E₂E₃Eᵢ | AlkL | | E_{d} |
| 1357 | E₁ₐE₂E₃Eᵢᵢ | AlkL | | E_{d} |
| 1358 | E_{1b}E₂E₃Eᵢᵢ | AlkL | | E_{d} |
| 1359 | E₁ₐE₂E₃EᵢᵢE_{iib} | AlkL | | E_{d} |
| 1360 | E_{1b}E₂E₃EᵢᵢE_{iib} | AlkL | | E_{d} |
| 1361 | E₁ₐE₂E₄ | AlkL | | E_{d} |
| 1362 | E_{1b}E₂E₄ | AlkL | | E_{d} |
| 1363 | E₁ₐE₂E₃E₄ | AlkL | | E_{d} |
| 1364 | E_{1b}E₂E₃E₄ | AlkL | | E_{d} |
| 1365 | E₁ₐE₂EᵢE₄ | AlkL | | E_{d} |
| 1366 | E_{1b}E₂EᵢE₄ | AlkL | | E_{d} |
| 1367 | E₁ₐE₂EᵢᵢE₄ | AlkL | | E_{d} |
| 1368 | E_{1b}E₂EᵢᵢE₄ | AlkL | | E_{d} |
| 1369 | E₁ₐE₂EᵢᵢE_{iib}E₄ | AlkL | | E_{d} |
| 1370 | E_{1b}E₂EᵢᵢE_{iib}E₄ | AlkL | | E_{d} |
| 1371 | E₁ₐE₂E₃EᵢE₄ | AlkL | | E_{d} |
| 1372 | E_{1b}E₂E₃EᵢE₄ | AlkL | | E_{d} |
| 1373 | E₁ₐE₂E₃EᵢᵢE₄ | AlkL | | E_{d} |
| 1374 | E_{1b}E₂E₃EᵢᵢE₄ | AlkL | | E_{d} |
| 1375 | E₁ₐE₂E₃EᵢᵢE_{iib}E₄ | AlkL | | E_{d} |
| 1376 | E_{1b}E₂E₃EᵢᵢE_{iib}E₄ | AlkL | | E_{d} |
| 1377 | E₁ₐE₂Eᵢᵢᵢ | AlkL | | E_{d} |
| 1378 | E_{1b}E₂Eᵢᵢᵢ | AlkL | | E_{d} |
| 1379 | E₁ₐE₂E₃Eᵢᵢᵢ | AlkL | | E_{d} |
| 1380 | E_{1b}E₂E₃Eᵢᵢᵢ | AlkL | | E_{d} |
| 1381 | E₁ₐE₂EᵢᵢᵢE₄ | AlkL | | E_{d} |
| 1382 | E_{1b}E₂EᵢᵢᵢE₄ | AlkL | | E_{d} |
| 1383 | E₁ₐE₂E₃EᵢᵢᵢE₄ | AlkL | | E_{d} |
| 1384 | E_{1b}E₂E₃EᵢᵢᵢE₄ | AlkL | | E_{d} |
| 1385 | E₁ₐE₂Eᵢᵥ | AlkL | | E_{d} |
| 1386 | E_{1b}E₂Eᵢᵥ | AlkL | | E_{d} |
| 1387 | E₁ₐE₂E₃Eᵢᵥ | AlkL | | E_{d} |
| 1388 | E_{1b}E₂E₃Eᵢᵥ | AlkL | | E_{d} |
| 1389 | E₁ₐE₂EᵢᵥE₄ | AlkL | | E_{d} |
| 1390 | E_{1b}E₂EᵢᵥE₄ | AlkL | | E_{d} |
| 1391 | E₁ₐE₂E₃EᵢᵥE₄ | AlkL | | E_{d} |
| 1392 | E_{1b}E₂E₃EᵢᵥE₄ | AlkL | | E_{d} |
| 1393 | E₁ₐE₂ | AlkL | E₄* | E_{d} |
| 1394 | E_{1b}E₂ | AlkL | E₄* | E_{d} |
| 1395 | E₁ₐE₂E₃ | AlkL | E₄* | E_{d} |
| 1396 | E_{1b}E₂E₃ | AlkL | E₄* | E_{d} |
| 1397 | E₁ₐE₂Eᵢ | AlkL | E₄* | E_{d} |
| 1398 | E_{1b}E₂Eᵢ | AlkL | E₄* | E_{d} |
| 1399 | E₁ₐE₂Eᵢᵢ | AlkL | E₄* | E_{d} |
| 1400 | E_{1b}E₂Eᵢᵢ | AlkL | E₄* | E_{d} |
| 1401 | E₁ₐE₂EᵢᵢE_{iib} | AlkL | E₄* | E_{d} |
| 1402 | E_{1b}E₂EᵢᵢE_{iib} | AlkL | E₄* | E_{d} |
| 1403 | E₁ₐE₂E₃Eᵢ | AlkL | E₄* | E_{d} |
| 1404 | E_{1b}E₂E₃Eᵢ | AlkL | E₄* | E_{d} |
| 1405 | E₁ₐE₂E₃Eᵢᵢ | AlkL | E₄* | E_{d} |
| 1406 | E_{1b}E₂E₃Eᵢᵢ | AlkL | E₄* | E_{d} |
| 1407 | E₁ₐE₂E₃EᵢᵢE_{iib} | AlkL | E₄* | E_{d} |
| 1408 | E_{1b}E₂E₃EᵢᵢE_{iib} | AlkL | E₄* | E_{d} |
| 1409 | E₁ₐE₂E₄ | AlkL | E₄* | E_{d} |
| 1410 | E_{1b}E₂E₄ | AlkL | E₄* | E_{d} |
| 1411 | E₁ₐE₂E₃E₄ | AlkL | E₄* | E_{d} |
| 1412 | E_{1b}E₂E₃E₄ | AlkL | E₄* | E_{d} |
| 1413 | E₁ₐE₂EᵢE₄ | AlkL | E₄* | E_{d} |
| 1414 | E_{1b}E₂EᵢE₄ | AlkL | E₄* | E_{d} |
| 1415 | E₁ₐE₂EᵢᵢE₄ | AlkL | E₄* | E_{d} |
| 1416 | E_{1b}E₂EᵢᵢE₄ | AlkL | E₄* | E_{d} |
| 1417 | E₁ₐE₂EᵢᵢE_{iib}E₄ | AlkL | E₄* | E_{d} |
| 1418 | E_{1b}E₂EᵢᵢE_{iib}E₄ | AlkL | E₄* | E_{d} |
| 1419 | E₁ₐE₂E₃EᵢE₄ | AlkL | E₄* | E_{d} |
| 1420 | E_{1b}E₂E₃EᵢE₄ | AlkL | E₄* | E_{d} |
| 1421 | E₁ₐE₂E₃EᵢᵢE₄ | AlkL | E₄* | E_{d} |
| 1422 | E_{1b}E₂E₃EᵢᵢE₄ | AlkL | E₄* | E_{d} |
| 1423 | E₁ₐE₂E₃EᵢᵢE_{iib}E₄ | AlkL | E₄* | E_{d} |
| 1424 | E_{1b}E₂E₃EᵢᵢE_{iib}E₄ | AlkL | E₄* | E_{d} |
| 1425 | E₁ₐE₂Eᵢᵢᵢ | AlkL | E₄* | E_{d} |
| 1426 | E_{1b}E₂Eᵢᵢᵢ | AlkL | E₄* | E_{d} |
| 1427 | E₁ₐE₂E₃Eᵢᵢᵢ | AlkL | E₄* | E_{d} |
| 1428 | E_{1b}E₂E₃Eᵢᵢᵢ | AlkL | E₄* | E_{d} |
| 1429 | E₁ₐE₂EᵢᵢᵢE₄ | AlkL | E₄* | E_{d} |
| 1430 | E_{1b}E₂EᵢᵢᵢE₄ | AlkL | E₄* | E_{d} |
| 1431 | E₁ₐE₂E₃EᵢᵢᵢE₄ | AlkL | E₄* | E_{d} |
| 1432 | E_{1b}E₂E₃EᵢᵢᵢE₄ | AlkL | E₄* | E_{d} |
| 1433 | E₁ₐE₂Eᵢᵥ | AlkL | E₄* | E_{d} |
| 1434 | E_{1b}E₂Eᵢᵥ | AlkL | E₄* | E_{d} |
| 1435 | E₁ₐE₂E₃Eᵢᵥ | AlkL | E₄* | E_{d} |
| 1436 | E_{1b}E₂E₃Eᵢᵥ | AlkL | E₄* | E_{d} |
| 1437 | E₁ₐE₂EᵢᵥE₄ | AlkL | E₄* | E_{d} |
| 1438 | E_{1b}E₂EᵢᵥE₄ | AlkL | E₄* | E_{d} |
| 1439 | E₁ₐE₂E₃EᵢᵥE₄ | AlkL | E₄* | E_{d} |
| 1440 | E_{1b}E₂E₃EᵢᵥE₄ | AlkL | E₄* | E_{d} |
| 1441 | E₁ₐE₂ | AlkL | E₅ | E_{d} |
| 1442 | E_{1b}E₂ | AlkL | E₅ | E_{d} |
| 1443 | E₁ₐE₂E₃ | AlkL | E₅ | E_{d} |
| 1444 | E_{1b}E₂E₃ | AlkL | E₅ | E_{d} |
| 1445 | E₁ₐE₂Eᵢ | AlkL | E₅ | E_{d} |
| 1446 | E_{1b}E₂Eᵢ | AlkL | E₅ | E_{d} |
| 1447 | E₁ₐE₂Eᵢᵢ | AlkL | E₅ | E_{d} |
| 1448 | E_{1b}E₂Eᵢᵢ | AlkL | E₅ | E_{d} |
| 1449 | E₁ₐE₂EᵢᵢE_{iib} | AlkL | E₅ | E_{d} |
| 1450 | E_{1b}E₂EᵢᵢE_{iib} | AlkL | E₅ | E_{d} |
| 1451 | E₁ₐE₂E₃Eᵢ | AlkL | E₅ | E_{d} |
| 1452 | E_{1b}E₂E₃Eᵢ | AlkL | E₅ | E_{d} |
| 1453 | E₁ₐE₂E₃Eᵢᵢ | AlkL | E₅ | E_{d} |
| 1454 | E_{1b}E₂E₃Eᵢᵢ | AlkL | E₅ | E_{d} |
| 1455 | E₁ₐE₂E₃EᵢᵢE_{iib} | AlkL | E₅ | E_{d} |
| 1456 | E_{1b}E₂E₃EᵢᵢE_{iib} | AlkL | E₅ | E_{d} |
| 1457 | E₁ₐE₂E₄ | AlkL | E₅ | E_{d} |
| 1458 | E_{1b}E₂E₄ | AlkL | E₅ | E_{d} |
| 1459 | E₁ₐE₂E₃E₄ | AlkL | E₅ | E_{d} |
| 1460 | E_{1b}E₂E₃E₄ | AlkL | E₅ | E_{d} |
| 1461 | E₁ₐE₂EᵢE₄ | AlkL | E₅ | E_{d} |
| 1462 | E_{1b}E₂EᵢE₄ | AlkL | E₅ | E_{d} |
| 1463 | E₁ₐE₂EᵢᵢE₄ | AlkL | E₅ | E_{d} |
| 1464 | E_{1b}E₂EᵢᵢE₄ | AlkL | E₅ | E_{d} |
| 1465 | E₁ₐE₂EᵢᵢE_{iib}E₄ | AlkL | E₅ | E_{d} |
| 1466 | E_{1b}E₂EᵢᵢE_{iib}E₄ | AlkL | E₅ | E_{d} |
| 1467 | E₁ₐE₂E₃EᵢE₄ | AlkL | E₅ | E_{d} |
| 1468 | E_{1b}E₂E₃EᵢE₄ | AlkL | E₅ | E_{d} |
| 1469 | E₁ₐE₂E₃EᵢᵢE₄ | AlkL | E₅ | E_{d} |
| 1470 | E_{1b}E₂E₃EᵢᵢE₄ | AlkL | E₅ | E_{d} |
| 1471 | E₁ₐE₂E₃EᵢᵢE_{iib}E₄ | AlkL | E₅ | E_{d} |
| 1472 | E_{1b}E₂E₃EᵢᵢE_{iib}E₄ | AlkL | E₅ | E_{d} |
| 1473 | E₁ₐE₂Eᵢᵢᵢ | AlkL | E₅ | E_{d} |
| 1474 | E_{1b}E₂Eᵢᵢᵢ | AlkL | E₅ | E_{d} |
| 1475 | E₁ₐE₂E₃Eᵢᵢᵢ | AlkL | E₅ | E_{d} |
| 1476 | E_{1b}E₂E₃Eᵢᵢᵢ | AlkL | E₅ | E_{d} |
| 1477 | E₁ₐE₂EᵢᵢᵢE₄ | AlkL | E₅ | E_{d} |
| 1478 | E_{1b}E₂EᵢᵢᵢE₄ | AlkL | E₅ | E_{d} |
| 1479 | E₁ₐE₂E₃EᵢᵢᵢE₄ | AlkL | E₅ | E_{d} |
| 1480 | E_{1b}E₂E₃EᵢᵢᵢE₄ | AlkL | E₅ | E_{d} |
| 1481 | E₁ₐE₂Eᵢᵥ | AlkL | E₅ | E_{d} |
| 1482 | E_{1b}E₂Eᵢᵥ | AlkL | E₅ | E_{d} |
| 1483 | E₁ₐE₂E₃Eᵢᵥ | AlkL | E₅ | E_{d} |
| 1484 | E_{1b}E₂E₃Eᵢᵥ | AlkL | E₅ | E_{d} |
| 1485 | E₁ₐE₂EᵢᵥE₄ | AlkL | E₅ | E_{d} |
| 1486 | E_{1b}E₂EᵢᵥE₄ | AlkL | E₅ | E_{d} |
| 1487 | E₁ₐE₂E₃EᵢᵥE₄ | AlkL | E₅ | E_{d} |
| 1488 | E_{1b}E₂E₃EᵢᵥE₄ | AlkL | E₅ | E_{d} |
| 1489 | E₁ₐE₂ | AlkL | E₄*E₅ | E_{d} |
| 1490 | E_{1b}E₂ | AlkL | E₄*E₅ | E_{d} |
| 1491 | E₁ₐE₂E₃ | AlkL | E₄*E₅ | E_{d} |
| 1492 | E_{1b}E₂E₃ | AlkL | E₄*E₅ | E_{d} |
| 1493 | E₁ₐE₂Eᵢ | AlkL | E₄*E₅ | E_{d} |
| 1494 | E_{1b}E₂Eᵢ | AlkL | E₄*E₅ | E_{d} |
| 1495 | E₁ₐE₂Eᵢᵢ | AlkL | E₄*E₅ | E_{d} |
| 1496 | E_{1b}E₂Eᵢᵢ | AlkL | E₄*E₅ | E_{d} |
| 1497 | E₁ₐE₂EᵢᵢE_{iib} | AlkL | E₄*E₅ | E_{d} |
| 1498 | E_{1b}E₂EᵢᵢE_{iib} | AlkL | E₄*E₅ | E_{d} |
| 1499 | E₁ₐE₂E₃Eᵢ | AlkL | E₄*E₅ | E_{d} |
| 1500 | E_{1b}E₂E₃Eᵢ | AlkL | E₄*E₅ | E_{d} |
| 1501 | E₁ₐE₂E₃Eᵢᵢ | AlkL | E₄*E₅ | E_{d} |
| 1502 | E_{1b}E₂E₃Eᵢᵢ | AlkL | E₄*E₅ | E_{d} |
| 1503 | E₁ₐE₂E₃EᵢᵢE_{iib} | AlkL | E₄*E₅ | E_{d} |
| 1504 | E_{1b}E₂E₃EᵢᵢE_{iib} | AlkL | E₄*E₅ | E_{d} |
| 1505 | E₁ₐE₂E₄ | AlkL | E₄*E₅ | E_{d} |
| 1506 | E_{1b}E₂E₄ | AlkL | E₄*E₅ | E_{d} |
| 1507 | E₁ₐE₂E₃E₄ | AlkL | E₄*E₅ | E_{d} |
| 1508 | E_{1b}E₂E₃E₄ | AlkL | E₄*E₅ | E_{d} |
| 1509 | E₁ₐE₂EᵢE₄ | AlkL | E₄*E₅ | E_{d} |
| 1510 | E_{1b}E₂EᵢE₄ | AlkL | E₄*E₅ | E_{d} |
| 1511 | E₁ₐE₂EᵢᵢE₄ | AlkL | E₄*E₅ | E_{d} |
| 1512 | E_{1b}E₂EᵢᵢE₄ | AlkL | E₄*E₅ | E_{d} |
| 1513 | E₁ₐE₂EᵢᵢE_{iib}E₄ | AlkL | E₄*E₅ | E_{d} |
| 1514 | E_{1b}E₂EᵢᵢE_{iib}E₄ | AlkL | E₄*E₅ | E_{d} |
| 1515 | E₁ₐE₂E₃EᵢE₄ | AlkL | E₄*E₅ | E_{d} |
| 1516 | E_{1b}E₂E₃EᵢE₄ | AlkL | E₄*E₅ | E_{d} |
| 1517 | E₁ₐE₂E₃EᵢᵢE₄ | AlkL | E₄*E₅ | E_{d} |
| 1518 | E_{1b}E₂E₃EᵢᵢE₄ | AlkL | E₄*E₅ | E_{d} |
| 1519 | E₁ₐE₂E₃EᵢᵢE_{iib}E₄ | AlkL | E₄*E₅ | E_{d} |
| 1520 | E_{1b}E₂E₃EᵢᵢE_{iib}E₄ | AlkL | E₄*E₅ | E_{d} |
| 1521 | E₁ₐE₂Eᵢᵢᵢ | AlkL | E₄*E₅ | E_{d} |
| 1522 | E_{1b}E₂Eᵢᵢᵢ | AlkL | E₄*E₅ | E_{d} |
| 1523 | E₁ₐE₂E₃Eᵢᵢᵢ | AlkL | E₄*E₅ | E_{d} |
| 1524 | E_{1b}E₂E₃Eᵢᵢᵢ | AlkL | E₄*E₅ | E_{d} |
| 1525 | E₁ₐE₂EᵢᵢᵢE₄ | AlkL | E₄*E₅ | E_{d} |
| 1526 | E_{1b}E₂EᵢᵢᵢE₄ | AlkL | E₄*E₅ | E_{d} |
| 1527 | E₁ₐE₂E₃EᵢᵢᵢE₄ | AlkL | E₄*E₅ | E_{d} |
| 1528 | E_{1b}E₂E₃EᵢᵢᵢE₄ | AlkL | E₄*E₅ | E_{d} |
| 1529 | E₁ₐE₂Eᵢᵥ | AlkL | E₄*E₅ | E_{d} |
| 1530 | E_{1b}E₂Eᵢᵥ | AlkL | E₄*E₅ | E_{d} |
| 1531 | E₁ₐE₂E₃Eᵢᵥ | AlkL | E₄*E₅ | E_{d} |
| 1532 | E_{1b}E₂E₃Eᵢᵥ | AlkL | E₄*E₅ | E_{d} |
| 1533 | E₁ₐE₂EᵢᵥE₄ | AlkL | E₄*E₅ | E_{d} |
| 1534 | E_{1b}E₂EᵢᵥE₄ | AlkL | E₄*E₅ | E_{d} |
| 1535 | E₁ₐE₂E₃EᵢᵥE₄ | AlkL | E₄*E₅ | E_{d} |
| 1536 | E_{1b}E₂E₃EᵢᵥE₄ | AlkL | E₄*E₅ | E_{d} |
| 1537 | E₁ₐE₂ | | | Eₑ |
| 1538 | E_{1b}E₂ | | | Eₑ |
| 1539 | E₁ₐE₂E₃ | | | Eₑ |
| 1540 | E_{1b}E₂E₃ | | | Eₑ |
| 1541 | E₁ₐE₂Eᵢ | | | Eₑ |
| 1542 | E_{1b}E₂Eᵢ | | | Eₑ |
| 1543 | E₁ₐE₂Eᵢᵢ | | | Eₑ |
| 1544 | E_{1b}E₂Eᵢᵢ | | | Eₑ |
| 1545 | E₁ₐE₂EᵢᵢE_{iib} | | | Eₑ |
| 1546 | E_{1b}E₂EᵢᵢE_{iib} | | | Eₑ |
| 1547 | E₁ₐE₂E₃Eᵢ | | | Eₑ |
| 1548 | E_{1b}E₂E₃Eᵢ | | | Eₑ |
| 1549 | E₁ₐE₂E₃Eᵢᵢ | | | Eₑ |
| 1550 | E_{1b}E₂E₃Eᵢᵢ | | | Eₑ |
| 1551 | E₁ₐE₂E₃EᵢᵢE_{iib} | | | Eₑ |
| 1552 | E_{1b}E₂E₃EᵢᵢE_{iib} | | | Eₑ |
| 1553 | E₁ₐE₂E₄ | | | Eₑ |
| 1554 | E_{1b}E₂E₄ | | | Eₑ |
| 1555 | E₁ₐE₂E₃E₄ | | | Eₑ |
| 1556 | E_{1b}E₂E₃E₄ | | | Eₑ |
| 1557 | E₁ₐE₂EᵢE₄ | | | Eₑ |
| 1558 | E_{1b}E₂EᵢE₄ | | | Eₑ |
| 1559 | E₁ₐE₂EᵢᵢE₄ | | | Eₑ |
| 1560 | E_{1b}E₂EᵢᵢE₄ | | | Eₑ |
| 1561 | E₁ₐE₂EᵢᵢE_{iib}E₄ | | | Eₑ |
| 1562 | E_{1b}E₂EᵢᵢE_{iib}E₄ | | | Eₑ |
| 1563 | E₁ₐE₂E₃EᵢE₄ | | | Eₑ |
| 1564 | E_{1b}E₂E₃EᵢE₄ | | | Eₑ |
| 1565 | E₁ₐE₂E₃EᵢᵢE₄ | | | Eₑ |
| 1566 | E_{1b}E₂E₃EᵢᵢE₄ | | | Eₑ |
| 1567 | E₁ₐE₂E₃EᵢᵢE_{iib}E₄ | | | Eₑ |
| 1568 | E_{1b}E₂E₃EᵢᵢE_{iib}E₄ | | | Eₑ |
| 1569 | E₁ₐE₂Eᵢᵢᵢ | | | Eₑ |
| 1570 | E_{1b}E₂Eᵢᵢᵢ | | | Eₑ |
| 1571 | E₁ₐE₂E₃Eᵢᵢᵢ | | | Eₑ |
| 1572 | E_{1b}E₂E₃Eᵢᵢᵢ | | | Eₑ |
| 1573 | E₁ₐE₂EᵢᵢᵢE₄ | | | Eₑ |
| 1574 | E_{1b}E₂EᵢᵢᵢE₄ | | | Eₑ |
| 1575 | E₁ₐE₂E₃EᵢᵢᵢE₄ | | | Eₑ |
| 1576 | E_{1b}E₂E₃EᵢᵢᵢE₄ | | | Eₑ |
| 1577 | E₁ₐE₂Eᵢᵥ | | | Eₑ |
| 1578 | E_{1b}E₂Eᵢᵥ | | | Eₑ |
| 1579 | E₁ₐE₂E₃Eᵢᵥ | | | Eₑ |
| 1580 | E_{1b}E₂E₃Eᵢᵥ | | | Eₑ |
| 1581 | E₁ₐE₂EᵢᵥE₄ | | | Eₑ |
| 1582 | E_{1b}E₂EᵢᵥE₄ | | | Eₑ |
| 1583 | E₁ₐE₂E₃EᵢᵥE₄ | | | Eₑ |
| 1584 | E_{1b}E₂E₃EᵢᵥE₄ | | | Eₑ |
| 1585 | E₁ₐE₂ | | E₄* | Eₑ |
| 1586 | E_{1b}E₂ | | E₄* | Eₑ |
| 1587 | E₁ₐE₂E₃ | | E₄* | Eₑ |
| 1588 | E_{1b}E₂E₃ | | E₄* | Eₑ |
| 1589 | E₁ₐE₂Eᵢ | | E₄* | Eₑ |
| 1590 | E_{1b}E₂Eᵢ | | E₄* | Eₑ |
| 1591 | E₁ₐE₂Eᵢᵢ | | E₄* | Eₑ |
| 1592 | E_{1b}E₂Eᵢᵢ | | E₄* | Eₑ |
| 1593 | E₁ₐE₂EᵢᵢE_{iib} | | E₄* | Eₑ |
| 1594 | E_{1b}E₂EᵢᵢE_{iib} | | E₄* | Eₑ |
| 1595 | E₁ₐE₂E₃Eᵢ | | E₄* | Eₑ |
| 1596 | E_{1b}E₂E₃Eᵢ | | E₄* | Eₑ |
| 1597 | E₁ₐE₂E₃Eᵢᵢ | | E₄* | Eₑ |
| 1598 | E_{1b}E₂E₃Eᵢᵢ | | E₄* | Eₑ |
| 1599 | E₁ₐE₂E₃EᵢᵢE_{iib} | | E₄* | Eₑ |
| 1600 | E_{1b}E₂E₃EᵢᵢE_{iib} | | E₄* | Eₑ |
| 1601 | E₁ₐE₂E₄ | | E₄* | Eₑ |
| 1602 | E_{1b}E₂E₄ | | E₄* | Eₑ |
| 1603 | E₁ₐE₂E₃E₄ | | E₄* | Eₑ |
| 1604 | E_{1b}E₂E₃E₄ | | E₄* | Eₑ |
| 1605 | E₁ₐE₂EᵢE₄ | | E₄* | Eₑ |
| 1606 | E_{1b}E₂EᵢE₄ | | E₄* | Eₑ |
| 1607 | E₁ₐE₂EᵢᵢE₄ | | E₄* | Eₑ |
| 1608 | E_{1b}E₂EᵢᵢE₄ | | E₄* | Eₑ |
| 1609 | E₁ₐE₂EᵢᵢE_{iib}E₄ | | E₄* | Eₑ |
| 1610 | E_{1b}E₂EᵢᵢE_{iib}E₄ | | E₄* | Eₑ |
| 1611 | E₁ₐE₂E₃EᵢE₄ | | E₄* | Eₑ |
| 1612 | E_{1b}E₂E₃EᵢE₄ | | E₄* | Eₑ |
| 1613 | E₁ₐE₂E₃EᵢᵢE₄ | | E₄* | Eₑ |
| 1614 | E_{1b}E₂E₃EᵢᵢE₄ | | E₄* | Eₑ |
| 1615 | E₁ₐE₂E₃EᵢᵢE_{iib}E₄ | | E₄* | Eₑ |
| 1616 | E_{1b}E₂E₃EᵢᵢE_{iib}E₄ | | E₄* | Eₑ |
| 1617 | E₁ₐE₂Eᵢᵢᵢ | | E₄* | Eₑ |
| 1618 | E_{1b}E₂Eᵢᵢᵢ | | E₄* | Eₑ |
| 1619 | E₁ₐE₂E₃Eᵢᵢᵢ | | E₄* | Eₑ |
| 1620 | E_{1b}E₂E₃Eᵢᵢᵢ | | E₄* | Eₑ |
| 1621 | E₁ₐE₂EᵢᵢᵢE₄ | | E₄* | Eₑ |
| 1622 | E_{1b}E₂EᵢᵢᵢE₄ | | E₄* | Eₑ |
| 1623 | E₁ₐE₂E₃EᵢᵢᵢE₄ | | E₄* | Eₑ |
| 1624 | E_{1b}E₂E₃EᵢᵢᵢE₄ | | E₄* | Eₑ |
| 1625 | E₁ₐE₂Eᵢᵥ | | E₄* | Eₑ |
| 1626 | E_{1b}E₂Eᵢᵥ | | E₄* | Eₑ |
| 1627 | E₁ₐE₂E₃Eᵢᵥ | | E₄* | Eₑ |
| 1628 | E_{1b}E₂E₃Eᵢᵥ | | E₄* | Eₑ |
| 1629 | E₁ₐE₂EᵢᵥE₄ | | E₄* | Eₑ |
| 1630 | E_{1b}E₂EᵢᵥE₄ | | E₄* | Eₑ |
| 1631 | E₁ₐE₂E₃EᵢᵥE₄ | | E₄* | Eₑ |
| 1632 | E_{1b}E₂E₃EᵢᵥE₄ | | E₄* | Eₑ |
| 1633 | E₁ₐE₂ | | E₅ | Eₑ |
| 1634 | E_{1b}E₂ | | E₅ | Eₑ |
| 1635 | E₁ₐE₂E₃ | | E₅ | Eₑ |
| 1636 | E_{1b}E₂E₃ | | E₅ | Eₑ |
| 1637 | E₁ₐE₂Eᵢ | | E₅ | Eₑ |
| 1638 | E_{1b}E₂Eᵢ | | E₅ | Eₑ |
| 1639 | E₁ₐE₂Eᵢᵢ | | E₅ | Eₑ |
| 1640 | E_{1b}E₂Eᵢᵢ | | E₅ | Eₑ |
| 1641 | E₁ₐE₂EᵢᵢE_{iib} | | E₅ | Eₑ |
| 1642 | E_{1b}E₂EᵢᵢE_{iib} | | E₅ | Eₑ |
| 1643 | E₁ₐE₂E₃Eᵢ | | E₅ | Eₑ |
| 1644 | E_{1b}E₂E₃Eᵢ | | E₅ | Eₑ |
| 1645 | E₁ₐE₂E₃Eᵢᵢ | | E₅ | Eₑ |
| 1646 | E_{1b}E₂E₃Eᵢᵢ | | E₅ | Eₑ |
| 1647 | E₁ₐE₂E₃EᵢᵢE_{iib} | | E₅ | Eₑ |
| 1648 | E_{1b}E₂E₃EᵢᵢE_{iib} | | E₅ | Eₑ |
| 1649 | E₁ₐE₂E₄ | | E₅ | Eₑ |
| 1650 | E_{1b}E₂E₄ | | E₅ | Eₑ |
| 1651 | E₁ₐE₂E₃E₄ | | E₅ | Eₑ |
| 1652 | E_{1b}E₂E₃E₄ | | E₅ | Eₑ |
| 1653 | E₁ₐE₂EᵢE₄ | | E₅ | Eₑ |
| 1654 | E_{1b}E₂EᵢE₄ | | E₅ | Eₑ |
| 1655 | E₁ₐE₂EᵢᵢE₄ | | E₅ | Eₑ |
| 1656 | E_{1b}E₂EᵢᵢE₄ | | E₅ | Eₑ |
| 1657 | E₁ₐE₂EᵢᵢE_{iib}E₄ | | E₅ | Eₑ |
| 1658 | E_{1b}E₂EᵢᵢE_{iib}E₄ | | E₅ | Eₑ |
| 1659 | E₁ₐE₂E₃EᵢE₄ | | E₅ | Eₑ |
| 1660 | E_{1b}E₂E₃EᵢE₄ | | E₅ | Eₑ |
| 1661 | E₁ₐE₂E₃EᵢᵢE₄ | | E₅ | Eₑ |
| 1662 | E_{1b}E₂E₃EᵢᵢE₄ | | E₅ | Eₑ |
| 1663 | E₁ₐE₂E₃EᵢᵢE_{iib}E₄ | | E₅ | Eₑ |
| 1664 | E_{1b}E₂E₃EᵢᵢE_{iib}E₄ | | E₅ | Eₑ |
| 1665 | E₁ₐE₂Eᵢᵢᵢ | | E₅ | Eₑ |
| 1666 | E_{1b}E₂Eᵢᵢᵢ | | E₅ | Eₑ |
| 1667 | E₁ₐE₂E₃Eᵢᵢᵢ | | E₅ | Eₑ |
| 1668 | E_{1b}E₂E₃Eᵢᵢᵢ | | E₅ | Eₑ |
| 1669 | E₁ₐE₂EᵢᵢᵢE₄ | | E₅ | Eₑ |
| 1670 | E_{1b}E₂EᵢᵢᵢE₄ | | E₅ | Eₑ |
| 1671 | E₁ₐE₂E₃EᵢᵢᵢE₄ | | E₅ | Eₑ |
| 1672 | E_{1b}E₂E₃EᵢᵢᵢE₄ | | E₅ | Eₑ |
| 1673 | E₁ₐE₂Eᵢᵥ | | E₅ | Eₑ |
| 1674 | E_{1b}E₂Eᵢᵥ | | E₅ | Eₑ |
| 1675 | E₁ₐE₂E₃Eᵢᵥ | | E₅ | Eₑ |
| 1676 | E_{1b}E₂E₃Eᵢᵥ | | E₅ | Eₑ |
| 1677 | E₁ₐE₂EᵢᵥE₄ | | E₅ | Eₑ |
| 1678 | E_{1b}E₂EᵢᵥE₄ | | E₅ | Eₑ |
| 1679 | E₁ₐE₂E₃EᵢᵥE₄ | | E₅ | Eₑ |
| 1680 | E_{1b}E₂E₃EᵢᵥE₄ | | E₅ | Eₑ |
| 1681 | E₁ₐE₂ | | E₄*E₅ | Eₑ |
| 1682 | E_{1b}E₂ | | E₄*E₅ | Eₑ |
| 1683 | E₁ₐE₂E₃ | | E₄*E₅ | Eₑ |
| 1684 | E_{1b}E₂E₃ | | E₄*E₅ | Eₑ |
| 1685 | E₁ₐE₂Eᵢ | | E₄*E₅ | Eₑ |
| 1686 | E_{1b}E₂Eᵢ | | E₄*E₅ | Eₑ |
| 1687 | E₁ₐE₂Eᵢᵢ | | E₄*E₅ | Eₑ |
| 1688 | E_{1b}E₂Eᵢᵢ | | E₄*E₅ | Eₑ |
| 1689 | E₁ₐE₂EᵢᵢE_{iib} | | E₄*E₅ | Eₑ |
| 1690 | E_{1b}E₂EᵢᵢE_{iib} | | E₄*E₅ | Eₑ |
| 1691 | E₁ₐE₂E₃Eᵢ | | E₄*E₅ | Eₑ |
| 1692 | E_{1b}E₂E₃Eᵢ | | E₄*E₅ | Eₑ |
| 1693 | E₁ₐE₂E₃Eᵢᵢ | | E₄*E₅ | Eₑ |
| 1694 | E_{1b}E₂E₃Eᵢᵢ | | E₄*E₅ | Eₑ |
| 1695 | E₁ₐE₂E₃EᵢᵢE_{iib} | | E₄*E₅ | Eₑ |
| 1696 | E_{1b}E₂E₃EᵢᵢE_{iib} | | E₄*E₅ | Eₑ |
| 1697 | E₁ₐE₂E₄ | | E₄*E₅ | Eₑ |
| 1698 | E_{1b}E₂E₄ | | E₄*E₅ | Eₑ |
| 1699 | E₁ₐE₂E₃E₄ | | E₄*E₅ | Eₑ |
| 1700 | E_{1b}E₂E₃E₄ | | E₄*E₅ | Eₑ |
| 1701 | E₁ₐE₂EᵢE₄ | | E₄*E₅ | Eₑ |
| 1702 | E_{1b}E₂EᵢE₄ | | E₄*E₅ | Eₑ |
| 1703 | E₁ₐE₂EᵢᵢE₄ | | E₄*E₅ | Eₑ |
| 1704 | E_{1b}E₂EᵢᵢE₄ | | E₄*E₅ | Eₑ |
| 1705 | E₁ₐE₂EᵢᵢE_{iib}E₄ | | E₄*E₅ | Eₑ |
| 1706 | E_{1b}E₂EᵢᵢE_{iib}E₄ | | E₄*E₅ | Eₑ |
| 1707 | E₁ₐE₂E₃EᵢE₄ | | E₄*E₅ | Eₑ |
| 1708 | E_{1b}E₂E₃EᵢE₄ | | E₄*E₅ | Eₑ |
| 1709 | E₁ₐE₂E₃EᵢᵢE₄ | | E₄*E₅ | Eₑ |
| 1710 | E_{1b}E₂E₃EᵢᵢE₄ | | E₄*E₅ | Eₑ |
| 1711 | E₁ₐE₂E₃EᵢᵢE_{iib}E₄ | | E₄*E₅ | Eₑ |
| 1712 | E_{1b}E₂E₃EᵢᵢE_{iib}E₄ | | E₄*E₅ | Eₑ |
| 1713 | E₁ₐE₂Eᵢᵢᵢ | | E₄*E₅ | Eₑ |
| 1714 | E_{1b}E₂Eᵢᵢᵢ | | E₄*E₅ | Eₑ |
| 1715 | E₁ₐE₂E₃Eᵢᵢᵢ | | E₄*E₅ | Eₑ |
| 1716 | E_{1b}E₂E₃Eᵢᵢᵢ | | E₄*E₅ | Eₑ |
| 1717 | E₁ₐE₂EᵢᵢᵢE₄ | | E₄*E₅ | Eₑ |
| 1718 | E_{1b}E₂EᵢᵢᵢE₄ | | E₄*E₅ | Eₑ |
| 1719 | E₁ₐE₂E₃EᵢᵢᵢE₄ | | E₄*E₅ | Eₑ |
| 1720 | E_{1b}E₂E₃EᵢᵢᵢE₄ | | E₄*E₅ | Eₑ |
| 1721 | E₁ₐE₂Eᵢᵥ | | E₄*E₅ | Eₑ |
| 1722 | E_{1b}E₂Eᵢᵥ | | E₄*E₅ | Eₑ |
| 1723 | E₁ₐE₂E₃Eᵢᵥ | | E₄*E₅ | Eₑ |
| 1724 | E_{1b}E₂E₃Eᵢᵥ | | E₄*E₅ | Eₑ |
| 1725 | E₁ₐE₂EᵢᵥE₄ | | E₄*E₅ | Eₑ |
| 1726 | E_{1b}E₂EᵢᵥE₄ | | E₄*E₅ | Eₑ |
| 1727 | E₁ₐE₂E₃EᵢᵥE₄ | | E₄*E₅ | Eₑ |
| 1728 | E_{1b}E₂E₃EᵢᵥE₄ | | E₄*E₅ | Eₑ |
| 1729 | E₁ₐE₂ | AlkL | | Eₑ |
| 1730 | E_{1b}E₂ | AlkL | | Eₑ |
| 1731 | E₁ₐE₂E₃ | AlkL | | Eₑ |
| 1732 | E_{1b}E₂E₃ | AlkL | | Eₑ |
| 1733 | E₁ₐE₂Eᵢ | AlkL | | Eₑ |
| 1734 | E_{1b}E₂Eᵢ | AlkL | | Eₑ |
| 1735 | E₁ₐE₂Eᵢᵢ | AlkL | | Eₑ |
| 1736 | E_{1b}E₂Eᵢᵢ | AlkL | | Eₑ |
| 1737 | E₁ₐE₂EᵢᵢE_{iib} | AlkL | | Eₑ |
| 1738 | E_{1b}E₂EᵢᵢE_{iib} | AlkL | | Eₑ |
| 1739 | E₁ₐE₂E₃Eᵢ | AlkL | | Eₑ |
| 1740 | E_{1b}E₂E₃Eᵢ | AlkL | | Eₑ |
| 1741 | E₁ₐE₂E₃Eᵢᵢ | AlkL | | Eₑ |
| 1742 | E_{1b}E₂E₃Eᵢᵢ | AlkL | | Eₑ |
| 1743 | E₁ₐE₂E₃EᵢᵢE_{iib} | AlkL | | Eₑ |
| 1744 | E_{1b}E₂E₃EᵢᵢE_{iib} | AlkL | | Eₑ |
| 1745 | E₁ₐE₂E₄ | AlkL | | Eₑ |
| 1746 | E_{1b}E₂E₄ | AlkL | | Eₑ |
| 1747 | E₁ₐE₂E₃E₄ | AlkL | | Eₑ |
| 1748 | E_{1b}E₂E₃E₄ | AlkL | | Eₑ |
| 1749 | E₁ₐE₂EᵢE₄ | AlkL | | Eₑ |
| 1750 | E_{1b}E₂EᵢE₄ | AlkL | | Eₑ |
| 1751 | E₁ₐE₂EᵢᵢE₄ | AlkL | | Eₑ |
| 1752 | E_{1b}E₂EᵢᵢE₄ | AlkL | | Eₑ |
| 1753 | E₁ₐE₂EᵢᵢE_{iib}E₄ | AlkL | | Eₑ |
| 1754 | E_{1b}E₂EᵢᵢE_{iib}E₄ | AlkL | | Eₑ |
| 1755 | E₁ₐE₂E₃EᵢE₄ | AlkL | | Eₑ |
| 1756 | E_{1b}E₂E₃EᵢE₄ | AlkL | | Eₑ |
| 1757 | E₁ₐE₂E₃EᵢᵢE₄ | AlkL | | Eₑ |
| 1758 | E_{1b}E₂E₃EᵢᵢE₄ | AlkL | | Eₑ |
| 1759 | E₁ₐE₂E₃EᵢᵢE_{iib}E₄ | AlkL | | Eₑ |
| 1760 | E_{1b}E₂E₃EᵢᵢE_{iib}E₄ | AlkL | | Eₑ |
| 1761 | E₁ₐE₂Eᵢᵢᵢ | AlkL | | Eₑ |
| 1762 | E_{1b}E₂Eᵢᵢᵢ | AlkL | | Eₑ |
| 1763 | E₁ₐE₂E₃Eᵢᵢᵢ | AlkL | | Eₑ |
| 1764 | E_{1b}E₂E₃Eᵢᵢᵢ | AlkL | | Eₑ |
| 1765 | E₁ₐE₂EᵢᵢᵢE₄ | AlkL | | Eₑ |
| 1766 | E_{1b}E₂EᵢᵢᵢE₄ | AlkL | | Eₑ |
| 1767 | E₁ₐE₂E₃EᵢᵢᵢE₄ | AlkL | | Eₑ |
| 1768 | E_{1b}E₂E₃EᵢᵢᵢE₄ | AlkL | | Eₑ |
| 1769 | E₁ₐE₂Eᵢᵥ | AlkL | | Eₑ |
| 1770 | E_{1b}E₂Eᵢᵥ | AlkL | | Eₑ |
| 1771 | E₁ₐE₂E₃Eᵢᵥ | AlkL | | Eₑ |
| 1772 | E_{1b}E₂E₃Eᵢᵥ | AlkL | | Eₑ |
| 1773 | E₁ₐE₂EᵢᵥE₄ | AlkL | | Eₑ |
| 1774 | E_{1b}E₂EᵢᵥE₄ | AlkL | | Eₑ |
| 1775 | E₁ₐE₂E₃EᵢᵥE₄ | AlkL | | Eₑ |
| 1776 | E_{1b}E₂E₃EᵢᵥE₄ | AlkL | | Eₑ |
| 1777 | E₁ₐE₂ | AlkL | E₄* | Eₑ |
| 1778 | E_{1b}E₂ | AlkL | E₄* | Eₑ |
| 1779 | E₁ₐE₂E₃ | AlkL | E₄* | Eₑ |
| 1780 | E_{1b}E₂E₃ | AlkL | E₄* | Eₑ |
| 1781 | E₁ₐE₂Eᵢ | AlkL | E₄* | Eₑ |
| 1782 | E_{1b}E₂Eᵢ | AlkL | E₄* | Eₑ |
| 1783 | E₁ₐE₂Eᵢᵢ | AlkL | E₄* | Eₑ |
| 1784 | E_{1b}E₂Eᵢᵢ | AlkL | E₄* | Eₑ |
| 1785 | E₁ₐE₂EᵢᵢE_{iib} | AlkL | E₄* | Eₑ |
| 1786 | E_{1b}E₂EᵢᵢE_{iib} | AlkL | E₄* | Eₑ |
| 1787 | E₁ₐE₂E₃Eᵢ | AlkL | E₄* | Eₑ |
| 1788 | E_{1b}E₂E₃Eᵢ | AlkL | E₄* | Eₑ |
| 1789 | E₁ₐE₂E₃Eᵢᵢ | AlkL | E₄* | Eₑ |
| 1790 | E_{1b}E₂E₃Eᵢᵢ | AlkL | E₄* | Eₑ |
| 1791 | E₁ₐE₂E₃EᵢᵢE_{iib} | AlkL | E₄* | Eₑ |
| 1792 | E_{1b}E₂E₃EᵢᵢE_{iib} | AlkL | E₄* | Eₑ |
| 1793 | E₁ₐE₂E₄ | AlkL | E₄* | Eₑ |
| 1794 | E_{1b}E₂E₄ | AlkL | E₄* | Eₑ |
| 1795 | E₁ₐE₂E₃E₄ | AlkL | E₄* | Eₑ |
| 1796 | E_{1b}E₂E₃E₄ | AlkL | E₄* | Eₑ |
| 1797 | E₁ₐE₂EᵢE₄ | AlkL | E₄* | Eₑ |
| 1798 | E_{1b}E₂EᵢE₄ | AlkL | E₄* | Eₑ |
| 1799 | E₁ₐE₂EᵢᵢE₄ | AlkL | E₄* | Eₑ |
| 1800 | E_{1b}E₂EᵢᵢE₄ | AlkL | E₄* | Eₑ |
| 1801 | E₁ₐE₂EᵢᵢE_{iib}E₄ | AlkL | E₄* | Eₑ |
| 1802 | E_{1b}E₂EᵢᵢE_{iib}E₄ | AlkL | E₄* | Eₑ |
| 1803 | E₁ₐE₂E₃EᵢE₄ | AlkL | E₄* | Eₑ |
| 1804 | E_{1b}E₂E₃EᵢE₄ | AlkL | E₄* | Eₑ |
| 1805 | E₁ₐE₂E₃EᵢᵢE₄ | AlkL | E₄* | Eₑ |
| 1806 | E_{1b}E₂E₃EᵢᵢE₄ | AlkL | E₄* | Eₑ |
| 1807 | E₁ₐE₂E₃EᵢᵢE_{iib}E₄ | AlkL | E₄* | Eₑ |
| 1808 | E_{1b}E₂E₃EᵢᵢE_{iib}E₄ | AlkL | E₄* | Eₑ |
| 1809 | E₁ₐE₂Eᵢᵢᵢ | AlkL | E₄* | Eₑ |
| 1810 | E_{1b}E₂Eᵢᵢᵢ | AlkL | E₄* | Eₑ |
| 1811 | E₁ₐE₂E₃Eᵢᵢᵢ | AlkL | E₄* | Eₑ |
| 1812 | E_{1b}E₂E₃Eᵢᵢᵢ | AlkL | E₄* | Eₑ |
| 1813 | E₁ₐE₂EᵢᵢᵢE₄ | AlkL | E₄* | Eₑ |
| 1814 | E_{1b}E₂EᵢᵢᵢE₄ | AlkL | E₄* | Eₑ |
| 1815 | E₁ₐE₂E₃EᵢᵢᵢE₄ | AlkL | E₄* | Eₑ |
| 1816 | E_{1b}E₂E₃EᵢᵢᵢE₄ | AlkL | E₄* | Eₑ |
| 1817 | E₁ₐE₂Eᵢᵥ | AlkL | E₄* | Eₑ |
| 1818 | E_{1b}E₂Eᵢᵥ | AlkL | E₄* | Eₑ |
| 1819 | E₁ₐE₂E₃Eᵢᵥ | AlkL | E₄* | Eₑ |
| 1820 | E_{1b}E₂E₃Eᵢᵥ | AlkL | E₄* | Eₑ |
| 1821 | E₁ₐE₂EᵢᵥE₄ | AlkL | E₄* | Eₑ |
| 1822 | E_{1b}E₂EᵢᵥE₄ | AlkL | E₄* | Eₑ |
| 1823 | E₁ₐE₂E₃EᵢᵥE₄ | AlkL | E₄* | Eₑ |
| 1824 | E_{1b}E₂E₃EᵢᵥE₄ | AlkL | E₄* | Eₑ |
| 1825 | E₁ₐE₂ | AlkL | E₅ | Eₑ |
| 1826 | E_{1b}E₂ | AlkL | E₅ | Eₑ |
| 1827 | E₁ₐE₂E₃ | AlkL | E₅ | Eₑ |
| 1828 | E_{1b}E₂E₃ | AlkL | E₅ | Eₑ |
| 1829 | E₁ₐE₂Eᵢ | AlkL | E₅ | Eₑ |
| 1830 | E_{1b}E₂Eᵢ | AlkL | E₅ | Eₑ |
| 1831 | E₁ₐE₂Eᵢᵢ | AlkL | E₅ | Eₑ |
| 1832 | E_{1b}E₂Eᵢᵢ | AlkL | E₅ | Eₑ |
| 1833 | E₁ₐE₂EᵢᵢE_{iib} | AlkL | E₅ | Eₑ |
| 1834 | E_{1b}E₂EᵢᵢE_{iib} | AlkL | E₅ | Eₑ |
| 1835 | E₁ₐE₂E₃Eᵢ | AlkL | E₅ | Eₑ |
| 1836 | E_{1b}E₂E₃Eᵢ | AlkL | E₅ | Eₑ |
| 1837 | E₁ₐE₂E₃Eᵢᵢ | AlkL | E₅ | Eₑ |
| 1838 | E_{1b}E₂E₃Eᵢᵢ | AlkL | E₅ | Eₑ |
| 1839 | E₁ₐE₂E₃EᵢᵢE_{iib} | AlkL | E₅ | Eₑ |
| 1840 | E_{1b}E₂E₃EᵢᵢE_{iib} | AlkL | E₅ | Eₑ |
| 1841 | E₁ₐE₂E₄ | AlkL | E₅ | Eₑ |
| 1842 | E_{1b}E₂E₄ | AlkL | E₅ | Eₑ |
| 1843 | E₁ₐE₂E₃E₄ | AlkL | E₅ | Eₑ |
| 1844 | E_{1b}E₂E₃E₄ | AlkL | E₅ | Eₑ |
| 1845 | E₁ₐE₂EᵢE₄ | AlkL | E₅ | Eₑ |
| 1846 | E_{1b}E₂EᵢE₄ | AlkL | E₅ | Eₑ |
| 1847 | E₁ₐE₂EᵢᵢE₄ | AlkL | E₅ | Eₑ |
| 1848 | E_{1b}E₂EᵢᵢE₄ | AlkL | E₅ | Eₑ |
| 1849 | E₁ₐE₂EᵢᵢE_{iib}E₄ | AlkL | E₅ | Eₑ |
| 1850 | E_{1b}E₂EᵢᵢE_{iib}E₄ | AlkL | E₅ | Eₑ |
| 1851 | E₁ₐE₂E₃EᵢE₄ | AlkL | E₅ | Eₑ |
| 1852 | E_{1b}E₂E₃EᵢE₄ | AlkL | E₅ | Eₑ |
| 1853 | E₁ₐE₂E₃EᵢᵢE₄ | AlkL | E₅ | Eₑ |
| 1854 | E_{1b}E₂E₃EᵢᵢE₄ | AlkL | E₅ | Eₑ |
| 1855 | E₁ₐE₂E₃EᵢᵢE_{iib}E₄ | AlkL | E₅ | Eₑ |
| 1856 | E_{1b}E₂E₃EᵢᵢE_{iib}E₄ | AlkL | E₅ | Eₑ |
| 1857 | E₁ₐE₂Eᵢᵢᵢ | AlkL | E₅ | Eₑ |
| 1858 | E_{1b}E₂Eᵢᵢᵢ | AlkL | E₅ | Eₑ |
| 1859 | E₁ₐE₂E₃Eᵢᵢᵢ | AlkL | E₅ | Eₑ |
| 1860 | E_{1b}E₂E₃Eᵢᵢᵢ | AlkL | E₅ | Eₑ |
| 1861 | E₁ₐE₂EᵢᵢᵢE₄ | AlkL | E₅ | Eₑ |
| 1862 | E_{1b}E₂EᵢᵢᵢE₄ | AlkL | E₅ | Eₑ |
| 1863 | E₁ₐE₂E₃EᵢᵢᵢE₄ | AlkL | E₅ | Eₑ |
| 1864 | E_{1b}E₂E₃EᵢᵢᵢE₄ | AlkL | E₅ | Eₑ |
| 1865 | E₁ₐE₂Eᵢᵥ | AlkL | E₅ | Eₑ |
| 1866 | E_{1b}E₂Eᵢᵥ | AlkL | E₅ | Eₑ |
| 1867 | E₁ₐE₂E₃Eᵢᵥ | AlkL | E₅ | Eₑ |
| 1868 | E_{1b}E₂E₃Eᵢᵥ | AlkL | E₅ | Eₑ |
| 1869 | E₁ₐE₂EᵢᵥE₄ | AlkL | E₅ | Eₑ |
| 1870 | E_{1b}E₂EᵢᵥE₄ | AlkL | E₅ | Eₑ |
| 1871 | E₁ₐE₂E₃EᵢᵥE₄ | AlkL | E₅ | Eₑ |
| 1872 | E_{1b}E₂E₃EᵢᵥE₄ | AlkL | E₅ | Eₑ |
| 1873 | E₁ₐE₂ | AlkL | E₄*E₅ | Eₑ |
| 1874 | E_{1b}E₂ | AlkL | E₄*E₅ | Eₑ |
| 1875 | E₁ₐE₂E₃ | AlkL | E₄*E₅ | Eₑ |
| 1876 | E_{1b}E₂E₃ | AlkL | E₄*E₅ | Eₑ |
| 1877 | E₁ₐE₂Eᵢ | AlkL | E₄*E₅ | Eₑ |
| 1878 | E_{1b}E₂Eᵢ | AlkL | E₄*E₅ | Eₑ |
| 1879 | E₁ₐE₂Eᵢᵢ | AlkL | E₄*E₅ | Eₑ |
| 1880 | E_{1b}E₂Eᵢᵢ | AlkL | E₄*E₅ | Eₑ |
| 1881 | E₁ₐE₂EᵢᵢE_{iib} | AlkL | E₄*E₅ | Eₑ |
| 1882 | E_{1b}E₂EᵢᵢE_{iib} | AlkL | E₄*E₅ | Eₑ |
| 1883 | E₁ₐE₂E₃Eᵢ | AlkL | E₄*E₅ | Eₑ |
| 1884 | E_{1b}E₂E₃Eᵢ | AlkL | E₄*E₅ | Eₑ |
| 1885 | E₁ₐE₂E₃Eᵢᵢ | AlkL | E₄*E₅ | Eₑ |
| 1886 | E_{1b}E₂E₃Eᵢᵢ | AlkL | E₄*E₅ | Eₑ |
| 1887 | E₁ₐE₂E₃EᵢᵢE_{iib} | AlkL | E₄*E₅ | Eₑ |
| 1888 | E_{1b}E₂E₃EᵢᵢE_{iib} | AlkL | E₄*E₅ | Eₑ |
| 1889 | E₁ₐE₂E₄ | AlkL | E₄*E₅ | Eₑ |
| 1890 | E_{1b}E₂E₄ | AlkL | E₄*E₅ | Eₑ |
| 1891 | E₁ₐE₂E₃E₄ | AlkL | E₄*E₅ | Eₑ |
| 1892 | E_{1b}E₂E₃E₄ | AlkL | E₄*E₅ | Eₑ |
| 1893 | E₁ₐE₂EᵢE₄ | AlkL | E₄*E₅ | Eₑ |
| 1894 | E_{1b}E₂EᵢE₄ | AlkL | E₄*E₅ | Eₑ |
| 1895 | E₁ₐE₂EᵢᵢE₄ | AlkL | E₄*E₅ | Eₑ |
| 1896 | E_{1b}E₂EᵢᵢE₄ | AlkL | E₄*E₅ | Eₑ |
| 1897 | E₁ₐE₂EᵢᵢE_{iib}E₄ | AlkL | E₄*E₅ | Eₑ |
| 1898 | E_{1b}E₂EᵢᵢE_{iib}E₄ | AlkL | E₄*E₅ | Eₑ |
| 1899 | E₁ₐE₂E₃EᵢE₄ | AlkL | E₄*E₅ | Eₑ |
| 1900 | E_{1b}E₂E₃EᵢE₄ | AlkL | E₄*E₅ | Eₑ |
| 1901 | E₁ₐE₂E₃EᵢᵢE₄ | AlkL | E₄*E₅ | Eₑ |
| 1902 | E_{1b}E₂E₃EᵢᵢE₄ | AlkL | E₄*E₅ | Eₑ |
| 1903 | E₁ₐE₂E₃EᵢᵢE_{iib}E₄ | AlkL | E₄*E₅ | Eₑ |
| 1904 | E_{1b}E₂E₃EᵢᵢE_{iib}E₄ | AlkL | E₄*E₅ | Eₑ |
| 1905 | E₁ₐE₂Eᵢᵢᵢ | AlkL | E₄*E₅ | Eₑ |
| 1906 | E_{1b}E₂Eᵢᵢᵢ | AlkL | E₄*E₅ | Eₑ |
| 1907 | E₁ₐE₂E₃Eᵢᵢᵢ | AlkL | E₄*E₅ | Eₑ |
| 1908 | E_{1b}E₂E₃Eᵢᵢᵢ | AlkL | E₄*E₅ | Eₑ |
| 1909 | E₁ₐE₂EᵢᵢᵢE₄ | AlkL | E₄*E₅ | Eₑ |
| 1910 | E_{1b}E₂EᵢᵢᵢE₄ | AlkL | E₄*E₅ | Eₑ |
| 1911 | E₁ₐE₂E₃EᵢᵢᵢE₄ | AlkL | E₄*E₅ | Eₑ |
| 1912 | E_{1b}E₂E₃EᵢᵢᵢE₄ | AlkL | E₄*E₅ | Eₑ |
| 1913 | E₁ₐE₂Eᵢᵥ | AlkL | E₄*E₅ | Eₑ |
| 1914 | E_{1b}E₂Eᵢᵥ | AlkL | E₄*E₅ | Eₑ |
| 1915 | E₁ₐE₂E₃Eᵢᵥ | AlkL | E₄*E₅ | Eₑ |
| 1916 | E_{1b}E₂E₃Eᵢᵥ | AlkL | E₄*E₅ | Eₑ |
| 1917 | E₁ₐE₂EᵢᵥE₄ | AlkL | E₄*E₅ | Eₑ |
| 1918 | E_{1b}E₂EᵢᵥE₄ | AlkL | E₄*E₅ | Eₑ |
| 1919 | E₁ₐE₂E₃EᵢᵥE₄ | AlkL | E₄*E₅ | Eₑ |
| 1920 | E_{1b}E₂E₃EᵢᵥE₄ | AlkL | E₄*E₅ | Eₑ |
| 1921 | E₁ₐE₂ | | | E_{f} |
| 1922 | E_{1b}E₂ | | | E_{f} |
| 1923 | E₁ₐE₂E₃ | | | E_{f} |
| 1924 | E_{1b}E₂E₃ | | | E_{f} |
| 1925 | E₁ₐE₂Eᵢ | | | E_{f} |
| 1926 | E_{1b}E₂Eᵢ | | | E_{f} |
| 1927 | E₁ₐE₂Eᵢᵢ | | | E_{f} |
| 1928 | E_{1b}E₂Eᵢᵢ | | | E_{f} |
| 1929 | E₁ₐE₂EᵢᵢE_{iib} | | | E_{f} |
| 1930 | E_{1b}E₂EᵢᵢE_{iib} | | | E_{f} |
| 1931 | E₁ₐE₂E₃Eᵢ | | | E_{f} |
| 1932 | E_{1b}E₂E₃Eᵢ | | | E_{f} |
| 1933 | E₁ₐE₂E₃Eᵢᵢ | | | E_{f} |
| 1934 | E_{1b}E₂E₃Eᵢᵢ | | | E_{f} |
| 1935 | E₁ₐE₂E₃EᵢᵢE_{iib} | | | E_{f} |
| 1936 | E_{1b}E₂E₃EᵢᵢE_{iib} | | | E_{f} |
| 1937 | E₁ₐE₂E₄ | | | E_{f} |
| 1938 | E_{1b}E₂E₄ | | | E_{f} |
| 1939 | E₁ₐE₂E₃E₄ | | | E_{f} |
| 1940 | E_{1b}E₂E₃E₄ | | | E_{f} |
| 1941 | E₁ₐE₂EᵢE₄ | | | E_{f} |
| 1942 | E_{1b}E₂EᵢE₄ | | | E_{f} |
| 1943 | E₁ₐE₂EᵢᵢE₄ | | | E_{f} |
| 1944 | E_{1b}E₂EᵢᵢE₄ | | | E_{f} |
| 1945 | E₁ₐE₂EᵢᵢE_{iib}E₄ | | | E_{f} |
| 1946 | E_{1b}E₂EᵢᵢE_{iib}E₄ | | | E_{f} |
| 1947 | E₁ₐE₂E₃EᵢE₄ | | | E_{f} |
| 1948 | E_{1b}E₂E₃EᵢE₄ | | | E_{f} |
| 1949 | E₁ₐE₂E₃EᵢᵢE₄ | | | E_{f} |
| 1950 | E_{1b}E₂E₃EᵢᵢE₄ | | | E_{f} |
| 1951 | E₁ₐE₂E₃EᵢᵢE_{iib}E₄ | | | E_{f} |
| 1952 | E_{1b}E₂E₃EᵢᵢE_{iib}E₄ | | | E_{f} |
| 1953 | E₁ₐE₂Eᵢᵢᵢ | | | E_{f} |
| 1954 | E_{1b}E₂Eᵢᵢᵢ | | | E_{f} |
| 1955 | E₁ₐE₂E₃Eᵢᵢᵢ | | | E_{f} |
| 1956 | E_{1b}E₂E₃Eᵢᵢᵢ | | | E_{f} |
| 1957 | E₁ₐE₂EᵢᵢᵢE₄ | | | E_{f} |
| 1958 | E_{1b}E₂EᵢᵢᵢE₄ | | | E_{f} |
| 1959 | E₁ₐE₂E₃EᵢᵢᵢE₄ | | | E_{f} |
| 1960 | E_{1b}E₂E₃EᵢᵢᵢE₄ | | | E_{f} |
| 1961 | E₁ₐE₂Eᵢᵥ | | | E_{f} |
| 1962 | E_{1b}E₂Eᵢᵥ | | | E_{f} |
| 1963 | E₁ₐE₂E₃Eᵢᵥ | | | E_{f} |
| 1964 | E_{1b}E₂E₃Eᵢᵥ | | | E_{f} |
| 1965 | E₁ₐE₂EᵢᵥE₄ | | | E_{f} |
| 1966 | E_{1b}E₂EᵢᵥE₄ | | | E_{f} |
| 1967 | E₁ₐE₂E₃EᵢᵥE₄ | | | E_{f} |
| 1968 | E_{1b}E₂E₃EᵢᵥE₄ | | | E_{f} |
| 1969 | E₁ₐE₂ | | E₄* | E_{f} |
| 1970 | E_{1b}E₂ | | E₄* | E_{f} |
| 1971 | E₁ₐE₂E₃ | | E₄* | E_{f} |
| 1972 | E_{1b}E₂E₃ | | E₄* | E_{f} |
| 1973 | E₁ₐE₂Eᵢ | | E₄* | E_{f} |
| 1974 | E_{1b}E₂Eᵢ | | E₄* | E_{f} |
| 1975 | E₁ₐE₂Eᵢᵢ | | E₄* | E_{f} |
| 1976 | E_{1b}E₂Eᵢᵢ | | E₄* | E_{f} |
| 1977 | E₁ₐE₂EᵢᵢE_{iib} | | E₄* | E_{f} |
| 1978 | E_{1b}E₂EᵢᵢE_{iib} | | E₄* | E_{f} |
| 1979 | E₁ₐE₂E₃Eᵢ | | E₄* | E_{f} |
| 1980 | E_{1b}E₂E₃Eᵢ | | E₄* | E_{f} |
| 1981 | E₁ₐE₂E₃Eᵢᵢ | | E₄* | E_{f} |
| 1982 | E_{1b}E₂E₃Eᵢᵢ | | E₄* | E_{f} |
| 1983 | E₁ₐE₂E₃EᵢᵢE_{iib} | | E₄* | E_{f} |
| 1984 | E_{1b}E₂E₃EᵢᵢE_{iib} | | E₄* | E_{f} |
| 1985 | E₁ₐE₂E₄ | | E₄* | E_{f} |
| 1986 | E_{1b}E₂E₄ | | E₄* | E_{f} |
| 1987 | E₁ₐE₂E₃E₄ | | E₄* | E_{f} |
| 1988 | E_{1b}E₂E₃E₄ | | E₄* | E_{f} |
| 1989 | E₁ₐE₂EᵢE₄ | | E₄* | E_{f} |
| 1990 | E_{1b}E₂EᵢE₄ | | E₄* | E_{f} |
| 1991 | E₁ₐE₂EᵢᵢE₄ | | E₄* | E_{f} |
| 1992 | E_{1b}E₂EᵢᵢE₄ | | E₄* | E_{f} |
| 1993 | E₁ₐE₂EᵢᵢE_{iib}E₄ | | E₄* | E_{f} |
| 1994 | E_{1b}E₂EᵢᵢE_{iib}E₄ | | E₄* | E_{f} |
| 1995 | E₁ₐE₂E₃EᵢE₄ | | E₄* | E_{f} |
| 1996 | E_{1b}E₂E₃EᵢE₄ | | E₄* | E_{f} |
| 1997 | E₁ₐE₂E₃EᵢᵢE₄ | | E₄* | E_{f} |
| 1998 | E_{1b}E₂E₃EᵢᵢE₄ | | E₄* | E_{f} |
| 1999 | E₁ₐE₂E₃EᵢᵢE_{iib}E₄ | | E₄* | E_{f} |
| 2000 | E_{1b}E₂E₃EᵢᵢE_{iib}E₄ | | E₄* | E_{f} |
| 2001 | E₁ₐE₂Eᵢᵢᵢ | | E₄* | E_{f} |
| 2002 | E_{1b}E₂Eᵢᵢᵢ | | E₄* | E_{f} |
| 2003 | E₁ₐE₂E₃Eᵢᵢᵢ | | E₄* | E_{f} |
| 2004 | E_{1b}E₂E₃Eᵢᵢᵢ | | E₄* | E_{f} |
| 2005 | E₁ₐE₂EᵢᵢᵢE₄ | | E₄* | E_{f} |
| 2006 | E_{1b}E₂EᵢᵢᵢE₄ | | E₄* | E_{f} |
| 2007 | E₁ₐE₂E₃EᵢᵢᵢE₄ | | E₄* | E_{f} |
| 2008 | E_{1b}E₂E₃EᵢᵢᵢE₄ | | E₄* | E_{f} |
| 2009 | E₁ₐE₂Eᵢᵥ | | E₄* | E_{f} |
| 2010 | E_{1b}E₂Eᵢᵥ | | E₄* | E_{f} |
| 2011 | E₁ₐE₂E₃Eᵢᵥ | | E₄* | E_{f} |
| 2012 | E_{1b}E₂E₃Eᵢᵥ | | E₄* | E_{f} |
| 2013 | E₁ₐE₂EᵢᵥE₄ | | E₄* | E_{f} |
| 2014 | E_{1b}E₂EᵢᵥE₄ | | E₄* | E_{f} |
| 2015 | E₁ₐE₂E₃EᵢᵥE₄ | | E₄* | E_{f} |
| 2016 | E_{1b}E₂E₃EᵢᵥE₄ | | E₄* | E_{f} |
| 2017 | E₁ₐE₂ | | E₅ | E_{f} |
| 2018 | E_{1b}E₂ | | E₅ | E_{f} |
| 2019 | E₁ₐE₂E₃ | | E₅ | E_{f} |
| 2020 | E_{1b}E₂E₃ | | E₅ | E_{f} |
| 2021 | E₁ₐE₂Eᵢ | | E₅ | E_{f} |
| 2022 | E_{1b}E₂Eᵢ | | E₅ | E_{f} |
| 2023 | E₁ₐE₂Eᵢᵢ | | E₅ | E_{f} |
| 2024 | E_{1b}E₂Eᵢᵢ | | E₅ | E_{f} |
| 2025 | E₁ₐE₂EᵢᵢE_{iib} | | E₅ | E_{f} |
| 2026 | E_{1b}E₂EᵢᵢE_{iib} | | E₅ | E_{f} |
| 2027 | E₁ₐE₂E₃Eᵢ | | E₅ | E_{f} |
| 2028 | E_{1b}E₂E₃Eᵢ | | E₅ | E_{f} |
| 2029 | E₁ₐE₂E₃Eᵢᵢ | | E₅ | E_{f} |
| 2030 | E_{1b}E₂E₃Eᵢᵢ | | E₅ | E_{f} |
| 2031 | E₁ₐE₂E₃EᵢᵢE_{iib} | | E₅ | E_{f} |
| 2032 | E_{1b}E₂E₃EᵢᵢE_{iib} | | E₅ | E_{f} |
| 2033 | E₁ₐE₂E₄ | | E₅ | E_{f} |
| 2034 | E_{1b}E₂E₄ | | E₅ | E_{f} |
| 2035 | E₁ₐE₂E₃E₄ | | E₅ | E_{f} |
| 2036 | E_{1b}E₂E₃E₄ | | E₅ | E_{f} |
| 2037 | E₁ₐE₂EᵢE₄ | | E₅ | E_{f} |
| 2038 | E_{1b}E₂EᵢE₄ | | E₅ | E_{f} |
| 2039 | E₁ₐE₂EᵢᵢE₄ | | E₅ | E_{f} |
| 2040 | E_{1b}E₂EᵢᵢE₄ | | E₅ | E_{f} |
| 2041 | E₁ₐE₂EᵢᵢE_{iib}E₄ | | E₅ | E_{f} |
| 2042 | E_{1b}E₂EᵢᵢE_{iib}E₄ | | E₅ | E_{f} |
| 2043 | E₁ₐE₂E₃EᵢE₄ | | E₅ | E_{f} |
| 2044 | E_{1b}E₂E₃EᵢE₄ | | E₅ | E_{f} |
| 2045 | E₁ₐE₂E₃EᵢᵢE₄ | | E₅ | E_{f} |
| 2046 | E_{1b}E₂E₃EᵢᵢE₄ | | E₅ | E_{f} |
| 2047 | E₁ₐE₂E₃EᵢᵢE_{iib}E₄ | | E₅ | E_{f} |
| 2048 | E_{1b}E₂E₃EᵢᵢE_{iib}E₄ | | E₅ | E_{f} |
| 2049 | E₁ₐE₂Eᵢᵢᵢ | | E₅ | E_{f} |
| 2050 | E_{1b}E₂Eᵢᵢᵢ | | E₅ | E_{f} |
| 2051 | E₁ₐE₂E₃Eᵢᵢᵢ | | E₅ | E_{f} |
| 2052 | E_{1b}E₂E₃Eᵢᵢᵢ | | E₅ | E_{f} |
| 2053 | E₁ₐE₂EᵢᵢᵢE₄ | | E₅ | E_{f} |
| 2054 | E_{1b}E₂EᵢᵢᵢE₄ | | E₅ | E_{f} |
| 2055 | E₁ₐE₂E₃EᵢᵢᵢE₄ | | E₅ | E_{f} |
| 2056 | E_{1b}E₂E₃EᵢᵢᵢE₄ | | E₅ | E_{f} |
| 2057 | E₁ₐE₂Eᵢᵥ | | E₅ | E_{f} |
| 2058 | E_{1b}E₂Eᵢᵥ | | E₅ | E_{f} |
| 2059 | E₁ₐE₂E₃Eᵢᵥ | | E₅ | E_{f} |
| 2060 | E_{1b}E₂E₃Eᵢᵥ | | E₅ | E_{f} |
| 2061 | E₁ₐE₂EᵢᵥE₄ | | E₅ | E_{f} |
| 2062 | E_{1b}E₂EᵢᵥE₄ | | E₅ | E_{f} |
| 2063 | E₁ₐE₂E₃EᵢᵥE₄ | | E₅ | E_{f} |
| 2064 | E_{1b}E₂E₃EᵢᵥE₄ | | E₅ | E_{f} |
| 2065 | E₁ₐE₂ | | E₄*E₅ | E_{f} |
| 2066 | E_{1b}E₂ | | E₄*E₅ | E_{f} |
| 2067 | E₁ₐE₂E₃ | | E₄*E₅ | E_{f} |
| 2068 | E_{1b}E₂E₃ | | E₄*E₅ | E_{f} |
| 2069 | E₁ₐE₂Eᵢ | | E₄*E₅ | E_{f} |
| 2070 | E_{1b}E₂Eᵢ | | E₄*E₅ | E_{f} |
| 2071 | E₁ₐE₂Eᵢᵢ | | E₄*E₅ | E_{f} |
| 2072 | E_{1b}E₂Eᵢᵢ | | E₄*E₅ | E_{f} |
| 2073 | E₁ₐE₂EᵢᵢE_{iib} | | E₄*E₅ | E_{f} |
| 2074 | E_{1b}E₂EᵢᵢE_{iib} | | E₄*E₅ | E_{f} |
| 2075 | E₁ₐE₂E₃Eᵢ | | E₄*E₅ | E_{f} |
| 2076 | E_{1b}E₂E₃Eᵢ | | E₄*E₅ | E_{f} |
| 2077 | E₁ₐE₂E₃Eᵢᵢ | | E₄*E₅ | E_{f} |
| 2078 | E_{1b}E₂E₃Eᵢᵢ | | E₄*E₅ | E_{f} |
| 2079 | E₁ₐE₂E₃EᵢᵢE_{iib} | | E₄*E₅ | E_{f} |
| 2080 | E_{1b}E₂E₃EᵢᵢE_{iib} | | E₄*E₅ | E_{f} |
| 2081 | E₁ₐE₂E₄ | | E₄*E₅ | E_{f} |
| 2082 | E_{1b}E₂E₄ | | E₄*E₅ | E_{f} |
| 2083 | E₁ₐE₂E₃E₄ | | E₄*E₅ | E_{f} |
| 2084 | E_{1b}E₂E₃E₄ | | E₄*E₅ | E_{f} |
| 2085 | E₁ₐE₂EᵢE₄ | | E₄*E₅ | E_{f} |
| 2086 | E_{1b}E₂EᵢE₄ | | E₄*E₅ | E_{f} |
| 2087 | E₁ₐE₂EᵢᵢE₄ | | E₄*E₅ | E_{f} |
| 2088 | E_{1b}E₂EᵢᵢE₄ | | E₄*E₅ | E_{f} |
| 2089 | E₁ₐE₂EᵢᵢE_{iib}E₄ | | E₄*E₅ | E_{f} |
| 2090 | E_{1b}E₂EᵢᵢE_{iib}E₄ | | E₄*E₅ | E_{f} |
| 2091 | E₁ₐE₂E₃EᵢE₄ | | E₄*E₅ | E_{f} |
| 2092 | E_{1b}E₂E₃EᵢE₄ | | E₄*E₅ | E_{f} |
| 2093 | E₁ₐE₂E₃EᵢᵢE₄ | | E₄*E₅ | E_{f} |
| 2094 | E_{1b}E₂E₃EᵢᵢE₄ | | E₄*E₅ | E_{f} |
| 2095 | E₁ₐE₂E₃EᵢᵢE_{iib}E₄ | | E₄*E₅ | E_{f} |
| 2096 | E_{1b}E₂E₃EᵢᵢE_{iib}E₄ | | E₄*E₅ | E_{f} |
| 2097 | E₁ₐE₂Eᵢᵢᵢ | | E₄*E₅ | E_{f} |
| 2098 | E_{1b}E₂Eᵢᵢᵢ | | E₄*E₅ | E_{f} |
| 2099 | E₁ₐE₂E₃Eᵢᵢᵢ | | E₄*E₅ | E_{f} |
| 2100 | E_{1b}E₂E₃Eᵢᵢᵢ | | E₄*E₅ | E_{f} |
| 2101 | E₁ₐE₂EᵢᵢᵢE₄ | | E₄*E₅ | E_{f} |
| 2102 | E_{1b}E₂EᵢᵢᵢE₄ | | E₄*E₅ | E_{f} |
| 2103 | E₁ₐE₂E₃EᵢᵢᵢE₄ | | E₄*E₅ | E_{f} |
| 2104 | E_{1b}E₂E₃EᵢᵢᵢE₄ | | E₄*E₅ | E_{f} |
| 2105 | E₁ₐE₂Eᵢᵥ | | E₄*E₅ | E_{f} |
| 2106 | E_{1b}E₂Eᵢᵥ | | E₄*E₅ | E_{f} |
| 2107 | E₁ₐE₂E₃Eᵢᵥ | | E₄*E₅ | E_{f} |
| 2108 | E_{1b}E₂E₃Eᵢᵥ | | E₄*E₅ | E_{f} |
| 2109 | E₁ₐE₂EᵢᵥE₄ | | E₄*E₅ | E_{f} |
| 2110 | E_{1b}E₂EᵢᵥE₄ | | E₄*E₅ | E_{f} |
| 2111 | E₁ₐE₂E₃EᵢᵥE₄ | | E₄*E₅ | E_{f} |
| 2112 | E_{1b}E₂E₃EᵢᵥE₄ | | E₄*E₅ | E_{f} |
| 2113 | E₁ₐE₂ | AlkL | | E_{f} |
| 2114 | E_{1b}E₂ | AlkL | | E_{f} |
| 2115 | E₁ₐE₂E₃ | AlkL | | E_{f} |
| 2116 | E_{1b}E₂E₃ | AlkL | | E_{f} |
| 2117 | E₁ₐE₂Eᵢ | AlkL | | E_{f} |
| 2118 | E_{1b}E₂Eᵢ | AlkL | | E_{f} |
| 2119 | E₁ₐE₂Eᵢᵢ | AlkL | | E_{f} |
| 2120 | E_{1b}E₂Eᵢᵢ | AlkL | | E_{f} |
| 2121 | E₁ₐE₂EᵢᵢE_{iib} | AlkL | | E_{f} |
| 2122 | E_{1b}E₂EᵢᵢE_{iib} | AlkL | | E_{f} |
| 2123 | E₁ₐE₂E₃Eᵢ | AlkL | | E_{f} |
| 2124 | E_{1b}E₂E₃Eᵢ | AlkL | | E_{f} |
| 2125 | E₁ₐE₂E₃Eᵢᵢ | AlkL | | E_{f} |
| 2126 | E_{1b}E₂E₃Eᵢᵢ | AlkL | | E_{f} |
| 2127 | E₁ₐE₂E₃EᵢᵢE_{iib} | AlkL | | E_{f} |
| 2128 | E_{1b}E₂E₃EᵢᵢE_{iib} | AlkL | | E_{f} |
| 2129 | E₁ₐE₂E₄ | AlkL | | E_{f} |
| 2130 | E_{1b}E₂E₄ | AlkL | | E_{f} |
| 2131 | E₁ₐE₂E₃E₄ | AlkL | | E_{f} |
| 2132 | E_{1b}E₂E₃E₄ | AlkL | | E_{f} |
| 2133 | E₁ₐE₂EᵢE₄ | AlkL | | E_{f} |
| 2134 | E_{1b}E₂EᵢE₄ | AlkL | | E_{f} |
| 2135 | E₁ₐE₂EᵢᵢE₄ | AlkL | | E_{f} |
| 2136 | E_{1b}E₂EᵢᵢE₄ | AlkL | | E_{f} |
| 2137 | E₁ₐE₂EᵢᵢE_{iib}E₄ | AlkL | | E_{f} |
| 2138 | E_{1b}E₂EᵢᵢE_{iib}E₄ | AlkL | | E_{f} |
| 2139 | E₁ₐE₂E₃EᵢE₄ | AlkL | | E_{f} |
| 2140 | E_{1b}E₂E₃EᵢE₄ | AlkL | | E_{f} |
| 2141 | E₁ₐE₂E₃EᵢᵢE₄ | AlkL | | E_{f} |
| 2142 | E_{1b}E₂E₃EᵢᵢE₄ | AlkL | | E_{f} |
| 2143 | E₁ₐE₂E₃EᵢᵢE_{iib}E₄ | AlkL | | E_{f} |
| 2144 | E_{1b}E₂E₃EᵢᵢE_{iib}E₄ | AlkL | | E_{f} |
| 2145 | E₁ₐE₂Eᵢᵢᵢ | AlkL | | E_{f} |
| 2146 | E_{1b}E₂Eᵢᵢᵢ | AlkL | | E_{f} |
| 2147 | E₁ₐE₂E₃Eᵢᵢᵢ | AlkL | | E_{f} |
| 2148 | E_{1b}E₂E₃Eᵢᵢᵢ | AlkL | | E_{f} |
| 2149 | E₁ₐE₂EᵢᵢᵢE₄ | AlkL | | E_{f} |
| 2150 | E_{1b}E₂EᵢᵢᵢE₄ | AlkL | | E_{f} |
| 2151 | E₁ₐE₂E₃EᵢᵢᵢE₄ | AlkL | | E_{f} |
| 2152 | E_{1b}E₂E₃EᵢᵢᵢE₄ | AlkL | | E_{f} |
| 2153 | E₁ₐE₂Eᵢᵥ | AlkL | | E_{f} |
| 2154 | E_{1b}E₂Eᵢᵥ | AlkL | | E_{f} |
| 2155 | E₁ₐE₂E₃Eᵢᵥ | AlkL | | E_{f} |
| 2156 | E_{1b}E₂E₃Eᵢᵥ | AlkL | | E_{f} |
| 2157 | E₁ₐE₂EᵢᵥE₄ | AlkL | | E_{f} |
| 2158 | E_{1b}E₂EᵢᵥE₄ | AlkL | | E_{f} |
| 2159 | E₁ₐE₂E₃EᵢᵥE₄ | AlkL | | E_{f} |
| 2160 | E_{1b}E₂E₃EᵢᵥE₄ | AlkL | | E_{f} |
| 2161 | E₁ₐE₂ | AlkL | E₄* | E_{f} |
| 2162 | E_{1b}E₂ | AlkL | E₄* | E_{f} |
| 2163 | E₁ₐE₂E₃ | AlkL | E₄* | E_{f} |
| 2164 | E_{1b}E₂E₃ | AlkL | E₄* | E_{f} |
| 2165 | E₁ₐE₂Eᵢ | AlkL | E₄* | E_{f} |
| 2166 | E_{1b}E₂Eᵢ | AlkL | E₄* | E_{f} |
| 2167 | E₁ₐE₂Eᵢᵢ | AlkL | E₄* | E_{f} |
| 2168 | E_{1b}E₂Eᵢᵢ | AlkL | E₄* | E_{f} |
| 2169 | E₁ₐE₂EᵢᵢE_{iib} | AlkL | E₄* | E_{f} |
| 2170 | E_{1b}E₂EᵢᵢE_{iib} | AlkL | E₄* | E_{f} |
| 2171 | E₁ₐE₂E₃Eᵢ | AlkL | E₄* | E_{f} |
| 2172 | E_{1b}E₂E₃Eᵢ | AlkL | E₄* | E_{f} |
| 2173 | E₁ₐE₂E₃Eᵢᵢ | AlkL | E₄* | E_{f} |
| 2174 | E_{1b}E₂E₃Eᵢᵢ | AlkL | E₄* | E_{f} |
| 2175 | E₁ₐE₂E₃EᵢᵢE_{iib} | AlkL | E₄* | E_{f} |
| 2176 | E_{1b}E₂E₃EᵢᵢE_{iib} | AlkL | E₄* | E_{f} |
| 2177 | E₁ₐE₂E₄ | AlkL | E₄* | E_{f} |
| 2178 | E_{1b}E₂E₄ | AlkL | E₄* | E_{f} |
| 2179 | E₁ₐE₂E₃E₄ | AlkL | E₄* | E_{f} |
| 2180 | E_{1b}E₂E₃E₄ | AlkL | E₄* | E_{f} |
| 2181 | E₁ₐE₂EᵢE₄ | AlkL | E₄* | E_{f} |
| 2182 | E_{1b}E₂EᵢE₄ | AlkL | E₄* | E_{f} |
| 2183 | E₁ₐE₂EᵢᵢE₄ | AlkL | E₄* | E_{f} |
| 2184 | E_{1b}E₂EᵢᵢE₄ | AlkL | E₄* | E_{f} |
| 2185 | E₁ₐE₂EᵢᵢE_{iib}E₄ | AlkL | E₄* | E_{f} |
| 2186 | E_{1b}E₂EᵢᵢE_{iib}E₄ | AlkL | E₄* | E_{f} |
| 2187 | E₁ₐE₂E₃EᵢE₄ | AlkL | E₄* | E_{f} |
| 2188 | E_{1b}E₂E₃EᵢE₄ | AlkL | E₄* | E_{f} |
| 2189 | E₁ₐE₂E₃EᵢᵢE₄ | AlkL | E₄* | E_{f} |
| 2190 | E_{1b}E₂E₃EᵢᵢE₄ | AlkL | E₄* | E_{f} |
| 2191 | E₁ₐE₂E₃EᵢᵢE_{iib}E₄ | AlkL | E₄* | E_{f} |
| 2192 | E_{1b}E₂E₃EᵢᵢE_{iib}E₄ | AlkL | E₄* | E_{f} |
| 2193 | E₁ₐE₂Eᵢᵢᵢ | AlkL | E₄* | E_{f} |
| 2194 | E_{1b}E₂Eᵢᵢᵢ | AlkL | E₄* | E_{f} |
| 2195 | E₁ₐE₂E₃Eᵢᵢᵢ | AlkL | E₄* | E_{f} |
| 2196 | E_{1b}E₂E₃Eᵢᵢᵢ | AlkL | E₄* | E_{f} |
| 2197 | E₁ₐE₂EᵢᵢᵢE₄ | AlkL | E₄* | E_{f} |
| 2198 | E_{1b}E₂EᵢᵢᵢE₄ | AlkL | E₄* | E_{f} |
| 2199 | E₁ₐE₂E₃EᵢᵢᵢE₄ | AlkL | E₄* | E_{f} |
| 2200 | E_{1b}E₂E₃EᵢᵢᵢE₄ | AlkL | E₄* | E_{f} |
| 2201 | E₁ₐE₂Eᵢᵥ | AlkL | E₄* | E_{f} |
| 2202 | E_{1b}E₂Eᵢᵥ | AlkL | E₄* | E_{f} |
| 2203 | E₁ₐE₂E₃Eᵢᵥ | AlkL | E₄* | E_{f} |
| 2204 | E_{1b}E₂E₃Eᵢᵥ | AlkL | E₄* | E_{f} |
| 2205 | E₁ₐE₂EᵢᵥE₄ | AlkL | E₄* | E_{f} |
| 2206 | E_{1b}E₂EᵢᵥE₄ | AlkL | E₄* | E_{f} |
| 2207 | E₁ₐE₂E₃EᵢᵥE₄ | AlkL | E₄* | E_{f} |
| 2208 | E_{1b}E₂E₃EᵢᵥE₄ | AlkL | E₄* | E_{f} |
| 2209 | E₁ₐE₂ | AlkL | E₅ | E_{f} |
| 2210 | E_{1b}E₂ | AlkL | E₅ | E_{f} |
| 2211 | E₁ₐE₂E₃ | AlkL | E₅ | E_{f} |
| 2212 | E_{1b}E₂E₃ | AlkL | E₅ | E_{f} |
| 2213 | E₁ₐE₂Eᵢ | AlkL | E₅ | E_{f} |
| 2214 | E_{1b}E₂Eᵢ | AlkL | E₅ | E_{f} |
| 2215 | E₁ₐE₂Eᵢᵢ | AlkL | E₅ | E_{f} |
| 2216 | E_{1b}E₂Eᵢᵢ | AlkL | E₅ | E_{f} |
| 2217 | E₁ₐE₂EᵢᵢE_{iib} | AlkL | E₅ | E_{f} |
| 2218 | E_{1b}E₂EᵢᵢE_{iib} | AlkL | E₅ | E_{f} |
| 2219 | E₁ₐE₂E₃Eᵢ | AlkL | E₅ | E_{f} |
| 2220 | E_{1b}E₂E₃Eᵢ | AlkL | E₅ | E_{f} |
| 2221 | E₁ₐE₂E₃Eᵢᵢ | AlkL | E₅ | E_{f} |
| 2222 | E_{1b}E₂E₃Eᵢᵢ | AlkL | E₅ | E_{f} |
| 2223 | E₁ₐE₂E₃EᵢᵢE_{iib} | AlkL | E₅ | E_{f} |
| 2224 | E_{1b}E₂E₃EᵢᵢE_{iib} | AlkL | E₅ | E_{f} |
| 2225 | E₁ₐE₂E₄ | AlkL | E₅ | E_{f} |
| 2226 | E_{1b}E₂E₄ | AlkL | E₅ | E_{f} |
| 2227 | E₁ₐE₂E₃E₄ | AlkL | E₅ | E_{f} |
| 2228 | E_{1b}E₂E₃E₄ | AlkL | E₅ | E_{f} |
| 2229 | E₁ₐE₂EᵢE₄ | AlkL | E₅ | E_{f} |
| 2230 | E_{1b}E₂EᵢE₄ | AlkL | E₅ | E_{f} |
| 2231 | E₁ₐE₂EᵢᵢE₄ | AlkL | E₅ | E_{f} |
| 2232 | E_{1b}E₂EᵢᵢE₄ | AlkL | E₅ | E_{f} |
| 2233 | E₁ₐE₂EᵢᵢE_{iib}E₄ | AlkL | E₅ | E_{f} |
| 2234 | E_{1b}E₂EᵢᵢE_{iib}E₄ | AlkL | E₅ | E_{f} |
| 2235 | E₁ₐE₂E₃EᵢE₄ | AlkL | E₅ | E_{f} |
| 2236 | E_{1b}E₂E₃EᵢE₄ | AlkL | E₅ | E_{f} |
| 2237 | E₁ₐE₂E₃EᵢᵢE₄ | AlkL | E₅ | E_{f} |
| 2238 | E_{1b}E₂E₃EᵢᵢE₄ | AlkL | E₅ | E_{f} |
| 2239 | E₁ₐE₂E₃EᵢᵢE_{iib}E₄ | AlkL | E₅ | E_{f} |
| 2240 | E_{1b}E₂E₃EᵢᵢE_{iib}E₄ | AlkL | E₅ | E_{f} |
| 2241 | E₁ₐE₂Eᵢᵢᵢ | AlkL | E₅ | E_{f} |
| 2242 | E_{1b}E₂Eᵢᵢᵢ | AlkL | E₅ | E_{f} |
| 2243 | E₁ₐE₂E₃Eᵢᵢᵢ | AlkL | E₅ | E_{f} |
| 2244 | E_{1b}E₂E₃Eᵢᵢᵢ | AlkL | E₅ | E_{f} |
| 2245 | E₁ₐE₂EᵢᵢᵢE₄ | AlkL | E₅ | E_{f} |
| 2246 | E_{1b}E₂EᵢᵢᵢE₄ | AlkL | E₅ | E_{f} |
| 2247 | E₁ₐE₂E₃EᵢᵢᵢE₄ | AlkL | E₅ | E_{f} |
| 2248 | E_{1b}E₂E₃EᵢᵢᵢE₄ | AlkL | E₅ | E_{f} |
| 2249 | E₁ₐE₂Eᵢᵥ | AlkL | E₅ | E_{f} |
| 2250 | E_{1b}E₂Eᵢᵥ | AlkL | E₅ | E_{f} |
| 2251 | E₁ₐE₂E₃Eᵢᵥ | AlkL | E₅ | E_{f} |
| 2252 | E_{1b}E₂E₃Eᵢᵥ | AlkL | E₅ | E_{f} |
| 2253 | E₁ₐE₂EᵢᵥE₄ | AlkL | E₅ | E_{f} |
| 2254 | E_{1b}E₂EᵢᵥE₄ | AlkL | E₅ | E_{f} |
| 2255 | E₁ₐE₂E₃EᵢᵥE₄ | AlkL | E₅ | E_{f} |
| 2256 | E_{1b}E₂E₃EᵢᵥE₄ | AlkL | E₅ | E_{f} |
| 2257 | E₁ₐE₂ | AlkL | E₄*E₅ | E_{f} |
| 2258 | E_{1b}E₂ | AlkL | E₄*E₅ | E_{f} |
| 2259 | E₁ₐE₂E₃ | AlkL | E₄*E₅ | E_{f} |
| 2260 | E_{1b}E₂E₃ | AlkL | E₄*E₅ | E_{f} |
| 2261 | E₁ₐE₂Eᵢ | AlkL | E₄*E₅ | E_{f} |
| 2262 | E_{1b}E₂Eᵢ | AlkL | E₄*E₅ | E_{f} |
| 2263 | E₁ₐE₂Eᵢᵢ | AlkL | E₄*E₅ | E_{f} |
| 2264 | E_{1b}E₂Eᵢᵢ | AlkL | E₄*E₅ | E_{f} |
| 2265 | E₁ₐE₂EᵢᵢE_{iib} | AlkL | E₄*E₅ | E_{f} |
| 2266 | E_{1b}E₂EᵢᵢE_{iib} | AlkL | E₄*E₅ | E_{f} |
| 2267 | E₁ₐE₂E₃Eᵢ | AlkL | E₄*E₅ | E_{f} |
| 2268 | E_{1b}E₂E₃Eᵢ | AlkL | E₄*E₅ | E_{f} |
| 2269 | E₁ₐE₂E₃Eᵢᵢ | AlkL | E₄*E₅ | E_{f} |
| 2270 | E_{1b}E₂E₃Eᵢᵢ | AlkL | E₄*E₅ | E_{f} |
| 2271 | E₁ₐE₂E₃EᵢᵢE_{iib} | AlkL | E₄*E₅ | E_{f} |
| 2272 | E_{1b}E₂E₃EᵢᵢE_{iib} | AlkL | E₄*E₅ | E_{f} |
| 2273 | E₁ₐE₂E₄ | AlkL | E₄*E₅ | E_{f} |
| 2274 | E_{1b}E₂E₄ | AlkL | E₄*E₅ | E_{f} |
| 2275 | E₁ₐE₂E₃E₄ | AlkL | E₄*E₅ | E_{f} |
| 2276 | E_{1b}E₂E₃E₄ | AlkL | E₄*E₅ | E_{f} |
| 2277 | E₁ₐE₂EᵢE₄ | AlkL | E₄*E₅ | E_{f} |
| 2278 | E_{1b}E₂EᵢE₄ | AlkL | E₄*E₅ | E_{f} |
| 2279 | E₁ₐE₂EᵢᵢE₄ | AlkL | E₄*E₅ | E_{f} |
| 2280 | E_{1b}E₂EᵢᵢE₄ | AlkL | E₄*E₅ | E_{f} |
| 2281 | E₁ₐE₂EᵢᵢE_{iib}E₄ | AlkL | E₄*E₅ | E_{f} |
| 2282 | E_{1b}E₂EᵢᵢE_{iib}E₄ | AlkL | E₄*E₅ | E_{f} |
| 2283 | E₁ₐE₂E₃EᵢE₄ | AlkL | E₄*E₅ | E_{f} |
| 2284 | E_{1b}E₂E₃EᵢE₄ | AlkL | E₄*E₅ | E_{f} |
| 2285 | E₁ₐE₂E₃EᵢᵢE₄ | AlkL | E₄*E₅ | E_{f} |
| 2286 | E_{1b}E₂E₃EᵢᵢE₄ | AlkL | E₄*E₅ | E_{f} |
| 2287 | E₁ₐE₂E₃EᵢᵢE_{iib}E₄ | AlkL | E₄*E₅ | E_{f} |
| 2288 | E_{1b}E₂E₃EᵢᵢE_{iib}E₄ | AlkL | E₄*E₅ | E_{f} |
| 2289 | E₁ₐE₂Eᵢᵢᵢ | AlkL | E₄*E₅ | E_{f} |
| 2290 | E_{1b}E₂Eᵢᵢᵢ | AlkL | E₄*E₅ | E_{f} |
| 2291 | E₁ₐE₂E₃Eᵢᵢᵢ | AlkL | E₄*E₅ | E_{f} |
| 2292 | E_{1b}E₂E₃Eᵢᵢᵢ | AlkL | E₄*E₅ | E_{f} |
| 2293 | E₁ₐE₂EᵢᵢᵢE₄ | AlkL | E₄*E₅ | E_{f} |
| 2294 | E_{1b}E₂EᵢᵢᵢE₄ | AlkL | E₄*E₅ | E_{f} |
| 2295 | E₁ₐE₂E₃EᵢᵢᵢE₄ | AlkL | E₄*E₅ | E_{f} |
| 2296 | E_{1b}E₂E₃EᵢᵢᵢE₄ | AlkL | E₄*E₅ | E_{f} |
| 2297 | E₁ₐE₂Eᵢᵥ | AlkL | E₄*E₅ | E_{f} |
| 2298 | E_{1b}E₂Eᵢᵥ | AlkL | E₄*E₅ | E_{f} |
| 2299 | E₁ₐE₂E₃Eᵢᵥ | AlkL | E₄*E₅ | E_{f} |
| 2300 | E_{1b}E₂E₃Eᵢᵥ | AlkL | E₄*E₅ | E_{f} |
| 2301 | E₁ₐE₂EᵢᵥE₄ | AlkL | E₄*E₅ | E_{f} |
| 2302 | E_{1b}E₂EᵢᵥE₄ | AlkL | E₄*E₅ | E_{f} |
| 2303 | E₁ₐE₂E₃EᵢᵥE₄ | AlkL | E₄*E₅ | E_{f} |
| 2304 | E_{1b}E₂E₃EᵢᵥE₄ | AlkL | E₄*E₅ | E_{f} |

[0187] Microorganisms quite especially preferred according to the invention (abbreviated as MO) are outstandingly suitable for the production of n-aminocarboxylate esters and have increased or decreased enzyme activities (abbreviated as E) described in the following table, where these can in addition advantageously be combined with an increased enzyme activity compared to the wild type of the microorganism, which is described for the 3-ketoacyl-ACP (Acyl Carrrier Protein) synthase III (EC 2.3.1.41), in particular that from plants, preferably that from plants the seeds whereof contain fatty acids with alkyl residues shorter than 14 C atoms, and particularly preferably that from plants of the genera Cuphea, Elaeis, Cocos, Umbellularia and Cinnamomum and gene products selected from AccA, AccB, AccC, AccD, AceE, AceF, Lpd, AcpP, FabA, FabB, FabD, FabF, FabG, FabH, Fabl, FabZ, PanD, PanK, UdhA, PntA or PntB. Any combinations of at least two of these enzyme activities can advantageously be increased.

[0188] In addition, moreover, it can be advantageous if the microorganism is provided with a lower enzyme activity compared to the wild type of the microorganism, which is described for the gene products selected from TdcE, PflA, PflB, PflC, PflD, PoxB, YgfG, AckA, AckB, TdcD, Pta, LdhA, AdhE, MgsA, FdnG, FdnH, FdnI, FdhF, FdoG, FdoH, FdoI, PrpC, PrpD, PrpF, PrpB, TdcD, Pdc, PorA, PorB, PorC, PorD, AlsS, IlvB, IlvM, IlvN, IlvG, IlyI, IlvH, AlsD, ButB, Thl, ThlA, ThlB, PhaA, PhaB, Crt, BdhA, BdhB, Adc, Adh, CtfB, AtoA, AtoD, LdhL, GltA, FabR, FhuA, Dld, LldA or LldP, singly or in any combination.

| | | |
|---|---|---|
| MO | E increased | E decreased |

| | | | | |
|---|---|---|---|---|
| 1 | E₁ₐE₂ | EᵥEᵥᵢ | | |
| 2 | E_{1b}E₂ | EᵥEᵥᵢ | | |
| 3 | E₁ₐE₂E₃ | EᵥEᵥᵢ | | |
| 4 | E_{1b}E₂E₃ | EᵥEᵥᵢ | | |
| 5 | E₁ₐE₂Eᵢ | EᵥEᵥᵢ | | |
| 6 | E_{1b}E₂Eᵢ | EᵥEᵥᵢ | | |
| 7 | E₁ₐE₂Eᵢᵢ | EᵥEᵥᵢ | | |
| 8 | E_{1b}E₂Eᵢᵢ | EᵥEᵥᵢ | | |
| 9 | E₁ₐE₂EᵢᵢE_{iib} | EᵥEᵥᵢ | | |
| 10 | E_{1b}E₂EᵢᵢE_{iib} | EᵥEᵥᵢ | | |
| 11 | E₁ₐE₂E₃Eᵢ | EᵥEᵥᵢ | | |
| 12 | E_{1b}E₂E₃Eᵢ | EᵥEᵥᵢ | | |
| 13 | E₁ₐE₂E₃Eᵢᵢ | EᵥEᵥᵢ | | |
| 14 | E_{1b}E₂E₃Eᵢᵢ | EᵥEᵥᵢ | | |
| 15 | E₁ₐE₂E₃EᵢᵢE_{iib} | EᵥEᵥᵢ | | |
| 16 | E_{1b}E₂E₃EᵢᵢE_{iib} | EᵥEᵥᵢ | | |
| 17 | E₁ₐE₂E₄ | EᵥEᵥᵢ | | |
| 18 | E_{1b}E₂E₄ | EᵥEᵥᵢ | | |
| 19 | E₁ₐE₂E₃E₄ | EᵥEᵥᵢ | | |
| 20 | E_{1b}E₂E₃E₄ | EᵥEᵥᵢ | | |
| 21 | E₁ₐE₂EᵢE₄ | EᵥEᵥᵢ | | |
| 22 | E_{1b}E₂EᵢE₄ | EᵥEᵥᵢ | | |
| 23 | E₁ₐE₂EᵢᵢE₄ | EᵥEᵥᵢ | | |
| 24 | E_{1b}E₂EᵢᵢE₄ | EᵥEᵥᵢ | | |
| 25 | E₁ₐE₂EᵢᵢE_{iib}E₄ | EᵥEᵥᵢ | | |
| 26 | E_{1b}E₂EᵢᵢE_{iib}E₄ | EᵥEᵥᵢ | | |
| 27 | E₁ₐE₂E₃EᵢE₄ | EᵥEᵥᵢ | | |
| 28 | E_{1b}E₂E₃EᵢE₄ | EᵥEᵥᵢ | | |
| 29 | E₁ₐE₂E₃EᵢᵢE₄ | EᵥEᵥᵢ | | |
| 30 | E_{1b}E₂E₃EᵢᵢE₄ | EᵥEᵥᵢ | | |
| 31 | E₁ₐE₂E₃EᵢᵢE_{iib}E₄ | EᵥEᵥᵢ | | |
| 32 | E_{1b}E₂E₃EᵢᵢE_{iib}E₄ | EᵥEᵥᵢ | | |
| 33 | E₁ₐE₂Eᵢᵢᵢ | EᵥEᵥᵢ | | |
| 34 | E_{1b}E₂Eᵢᵢᵢ | EᵥEᵥᵢ | | |
| 35 | E₁ₐE₂E₃Eᵢᵢᵢ | EᵥEᵥᵢ | | |
| 36 | E_{1b}E₂E₃Eᵢᵢᵢ | EᵥEᵥᵢ | | |
| 37 | E₁ₐE₂EᵢᵢᵢE₄ | EᵥEᵥᵢ | | |
| 38 | E_{1b}E₂EᵢᵢᵢE₄ | EᵥEᵥᵢ | | |
| 39 | E₁ₐE₂E₃EᵢᵢᵢE₄ | EᵥEᵥᵢ | | |
| 40 | E_{1b}E₂E₃EᵢᵢᵢE₄ | EᵥEᵥᵢ | | |
| 41 | E₁ₐE₂Eᵢᵥ | EᵥEᵥᵢ | | |
| 42 | E_{1b}E₂Eᵢᵥ | EᵥEᵥᵢ | | |
| 43 | E₁ₐE₂E₃Eᵢᵥ | EᵥEᵥᵢ | | |
| 44 | E_{1b}E₂E₃Eᵢᵥ | EᵥEᵥᵢ | | |
| 45 | E₁ₐE₂EᵢᵥE₄ | EᵥEᵥᵢ | | |
| 46 | E_{1b}E₂EᵢᵥE₄ | EᵥEᵥᵢ | | |
| 47 | E₁ₐE₂E₃EᵢᵥE₄ | EᵥEᵥᵢ | | |
| 48 | E_{1b}E₂E₃EᵢᵥE₄ | EᵥEᵥᵢ | | |
| 49 | E₁ₐE₂ | EᵥEᵥᵢ | E₄* | |
| 50 | E_{1b}E₂ | EᵥEᵥᵢ | E₄* | |
| 51 | E₁ₐE₂E₃ | EᵥEᵥᵢ | E₄* | |
| 52 | E_{1b}E₂E₃ | EᵥEᵥᵢ | E₄* | |
| 53 | E₁ₐE₂Eᵢ | EᵥEᵥᵢ | E₄* | |
| 54 | E_{1b}E₂Eᵢ | EᵥEᵥᵢ | E₄* | |
| 55 | E₁ₐE₂Eᵢᵢ | EᵥEᵥᵢ | E₄* | |
| 56 | E_{1b}E₂Eᵢᵢ | EᵥEᵥᵢ | E₄* | |
| 57 | E₁ₐE₂EᵢᵢE_{iib} | EᵥEᵥᵢ | E₄* | |
| 58 | E_{1b}E₂EᵢᵢE_{iib} | EᵥEᵥᵢ | E₄* | |
| 59 | E₁ₐE₂E₃Eᵢ | EᵥEᵥᵢ | E₄* | |
| 60 | E_{1b}E₂E₃Eᵢ | EᵥEᵥᵢ | E₄* | |
| 61 | E₁ₐE₂E₃Eᵢᵢ | EᵥEᵥᵢ | E₄* | |
| 62 | E_{1b}E₂E₃Eᵢᵢ | EᵥEᵥᵢ | E₄* | |
| 63 | E₁ₐE₂E₃EᵢᵢE_{iib} | EᵥEᵥᵢ | E₄* | |
| 64 | E_{1b}E₂E₃EᵢᵢE_{iib} | EᵥEᵥᵢ | E₄* | |
| 65 | E₁ₐE₂E₄ | EᵥEᵥᵢ | E₄* | |
| 66 | E_{1b}E₂E₄ | EᵥEᵥᵢ | E₄* | |
| 67 | E₁ₐE₂E₃E₄ | EᵥEᵥᵢ | E₄* | |
| 68 | E_{1b}E₂E₃E₄ | EᵥEᵥᵢ | E₄* | |
| 69 | E₁ₐE₂EᵢE₄ | EᵥEᵥᵢ | E₄* | |
| 70 | E_{1b}E₂EᵢE₄ | EᵥEᵥᵢ | E₄* | |
| 71 | E₁ₐE₂EᵢᵢE₄ | EᵥEᵥᵢ | E₄* | |
| 72 | E_{1b}E₂EᵢᵢE₄ | EᵥEᵥᵢ | E₄* | |
| 73 | E₁ₐE₂EᵢᵢE_{iib}E₄ | EᵥEᵥᵢ | E₄* | |
| 74 | E_{1b}E₂EᵢᵢE_{iib}E₄ | EᵥEᵥᵢ | E₄* | |
| 75 | E₁ₐE₂E₃EᵢE₄ | EᵥEᵥᵢ | E₄* | |
| 76 | E_{1b}E₂E₃EᵢE₄ | EᵥEᵥᵢ | E₄* | |
| 77 | E₁ₐE₂E₃EᵢᵢE₄ | EᵥEᵥᵢ | E₄* | |
| 78 | E_{1b}E₂E₃EᵢᵢE₄ | EᵥEᵥᵢ | E₄* | |
| 79 | E₁ₐE₂E₃EᵢᵢE_{iib}E₄ | EᵥEᵥᵢ | E₄* | |
| 80 | E_{1b}E₂E₃EᵢᵢE_{iib}E₄ | EᵥEᵥᵢ | E₄* | |
| 81 | E₁ₐE₂Eᵢᵢᵢ | EᵥEᵥᵢ | E₄* | |
| 82 | E_{1b}E₂Eᵢᵢᵢ | EᵥEᵥᵢ | E₄* | |
| 83 | E₁ₐE₂E₃Eᵢᵢᵢ | EᵥEᵥᵢ | E₄* | |
| 84 | E_{1b}E₂E₃Eᵢᵢᵢ | EᵥEᵥᵢ | E₄* | |
| 85 | E₁ₐE₂EᵢᵢᵢE₄ | EᵥEᵥᵢ | E₄* | |
| 86 | E_{1b}E₂EᵢᵢᵢE₄ | EᵥEᵥᵢ | E₄* | |
| 87 | E₁ₐE₂E₃EᵢᵢᵢE₄ | EᵥEᵥᵢ | E₄* | |
| 88 | E_{1b}E₂E₃EᵢᵢᵢE₄ | EᵥEᵥᵢ | E₄* | |
| 89 | E₁ₐE₂Eᵢᵥ | EᵥEᵥᵢ | E₄* | |
| 90 | E_{1b}E₂Eᵢᵥ | EᵥEᵥᵢ | E₄* | |
| 91 | E₁ₐE₂E₃Eᵢᵥ | EᵥEᵥᵢ | E₄* | |
| 92 | E_{1b}E₂E₃Eᵢᵥ | EᵥEᵥᵢ | E₄* | |
| 93 | E₁ₐE₂EᵢᵥE₄ | EᵥEᵥᵢ | E₄* | |
| 94 | E_{1b}E₂EᵢᵥE₄ | EᵥEᵥᵢ | E₄* | |
| 95 | E₁ₐE₂E₃EᵢᵥE₄ | EᵥEᵥᵢ | E₄* | |
| 96 | E_{1b}E₂E₃EᵢᵥE₄ | EᵥEᵥᵢ | E₄* | |
| 97 | E₁ₐE₂ | EᵥEᵥᵢ | E₅ | |
| 98 | E_{1b}E₂ | EᵥEᵥᵢ | E₅ | |
| 99 | E₁ₐE₂E₃ | EᵥEᵥᵢ | E₅ | |
| 100 | E_{1b}E₂E₃ | EᵥEᵥᵢ | E₅ | |
| 101 | E₁ₐE₂Eᵢ | EᵥEᵥᵢ | E₅ | |
| 102 | E_{1b}E₂Eᵢ | EᵥEᵥᵢ | E₅ | |
| 103 | E₁ₐE₂Eᵢᵢ | EᵥEᵥᵢ | E₅ | |
| 104 | E_{1b}E₂Eᵢᵢ | EᵥEᵥᵢ | E₅ | |
| 105 | E₁ₐE₂EᵢᵢE_{iib} | EᵥEᵥᵢ | E₅ | |
| 106 | E_{1b}E₂EᵢᵢE_{iib} | EᵥEᵥᵢ | E₅ | |
| 107 | E₁ₐE₂E₃Eᵢ | EᵥEᵥᵢ | E₅ | |
| 108 | E_{1b}E₂E₃Eᵢ | EᵥEᵥᵢ | E₅ | |
| 109 | E₁ₐE₂E₃Eᵢᵢ | EᵥEᵥᵢ | E₅ | |
| 110 | E_{1b}E₂E₃Eᵢᵢ | EᵥEᵥᵢ | E₅ | |
| 111 | E₁ₐE₂E₃EᵢᵢE_{iib} | EᵥEᵥᵢ | E₅ | |
| 112 | E_{1b}E₂E₃EᵢᵢE_{iib} | EᵥEᵥᵢ | E₅ | |
| 113 | E₁ₐE₂E₄ | EᵥEᵥᵢ | E₅ | |
| 114 | E_{1b}E₂E₄ | EᵥEᵥᵢ | E₅ | |
| 115 | E₁ₐE₂E₃E₄ | EᵥEᵥᵢ | E₅ | |
| 116 | E_{1b}E₂E₃E₄ | EᵥEᵥᵢ | E₅ | |
| 117 | E₁ₐE₂EᵢE₄ | EᵥEᵥᵢ | E₅ | |
| 118 | E_{1b}E₂EᵢE₄ | EᵥEᵥᵢ | E₅ | |
| 119 | E₁ₐE₂EᵢᵢE₄ | EᵥEᵥᵢ | E₅ | |
| 120 | E_{1b}E₂EᵢᵢE₄ | EᵥEᵥᵢ | E₅ | |
| 121 | E₁ₐE₂EᵢᵢE_{iib}E₄ | EᵥEᵥᵢ | E₅ | |
| 122 | E_{1b}E₂EᵢᵢE_{iib}E₄ | EᵥEᵥᵢ | E₅ | |
| 123 | E₁ₐE₂E₃EᵢE₄ | EᵥEᵥᵢ | E₅ | |
| 124 | E_{1b}E₂E₃EᵢE₄ | EᵥEᵥᵢ | E₅ | |
| 125 | E₁ₐE₂E₃EᵢᵢE₄ | EᵥEᵥᵢ | E₅ | |
| 126 | E_{1b}E₂E₃EᵢᵢE₄ | EᵥEᵥᵢ | E₅ | |
| 127 | E₁ₐE₂E₃EᵢᵢE_{iib}E₄ | EᵥEᵥᵢ | E₅ | |
| 128 | E_{1b}E₂E₃EᵢᵢE_{iib}E₄ | EᵥEᵥᵢ | E₅ | |
| 129 | E₁ₐE₂Eᵢᵢᵢ | EᵥEᵥᵢ | E₅ | |
| 130 | E_{1b}E₂Eᵢᵢᵢ | EᵥEᵥᵢ | E₅ | |
| 131 | E₁ₐE₂E₃Eᵢᵢᵢ | EᵥEᵥᵢ | E₅ | |
| 132 | E_{1b}E₂E₃Eᵢᵢᵢ | EᵥEᵥᵢ | E₅ | |
| 133 | E₁ₐE₂EᵢᵢᵢE₄ | EᵥEᵥᵢ | E₅ | |
| 134 | E_{1b}E₂EᵢᵢᵢE₄ | EᵥEᵥᵢ | E₅ | |
| 135 | E₁ₐE₂E₃EᵢᵢᵢE₄ | EᵥEᵥᵢ | E₅ | |
| 136 | E_{1b}E₂E₃EᵢᵢᵢE₄ | EᵥEᵥᵢ | E₅ | |
| 137 | E₁ₐE₂Eᵢᵥ | EᵥEᵥᵢ | E₅ | |
| 138 | E_{1b}E₂Eᵢᵥ | EᵥEᵥᵢ | E₅ | |
| 139 | E₁ₐE₂E₃Eᵢᵥ | EᵥEᵥᵢ | E₅ | |
| 140 | E_{1b}E₂E₃Eᵢᵥ | EᵥEᵥᵢ | E₅ | |
| 141 | E₁ₐE₂EᵢᵥE₄ | EᵥEᵥᵢ | E₅ | |
| 142 | E_{1b}E₂EᵢᵥE₄ | EᵥEᵥᵢ | E₅ | |
| 143 | E₁ₐE₂E₃EᵢᵥE₄ | EᵥEᵥᵢ | E₅ | |
| 144 | E_{1b}E₂E₃EᵢᵥE₄ | EᵥEᵥᵢ | E₅ | |
| 145 | E₁ₐE₂ | EᵥEᵥᵢ | E₄*E₅ | |
| 146 | E_{1b}E₂ | EᵥEᵥᵢ | E₄*E₅ | |
| 147 | E₁ₐE₂E₃ | EᵥEᵥᵢ | E₄*E₅ | |
| 148 | E_{1b}E₂E₃ | EᵥEᵥᵢ | E₄*E₅ | |
| 149 | E₁ₐE₂Eᵢ | EᵥEᵥᵢ | E₄*E₅ | |
| 150 | E_{1b}E₂Eᵢ | EᵥEᵥᵢ | E₄*E₅ | |
| 151 | E₁ₐE₂Eᵢᵢ | EᵥEᵥᵢ | E₄*E₅ | |
| 152 | E_{1b}E₂Eᵢᵢ | EᵥEᵥᵢ | E₄*E₅ | |
| 153 | E₁ₐE₂EᵢᵢE_{iib} | EᵥEᵥᵢ | E₄*E₅ | |
| 154 | E_{1b}E₂EᵢᵢE_{iib} | EᵥEᵥᵢ | E₄*E₅ | |
| 155 | E₁ₐE₂E₃Eᵢ | EᵥEᵥᵢ | E₄*E₅ | |
| 156 | E_{1b}E₂E₃Eᵢ | EᵥEᵥᵢ | E₄*E₅ | |
| 157 | E₁ₐE₂E₃Eᵢᵢ | EᵥEᵥᵢ | E₄*E₅ | |
| 158 | E_{1b}E₂E₃Eᵢᵢ | EᵥEᵥᵢ | E₄*E₅ | |
| 159 | E₁ₐE₂E₃EᵢᵢE_{iib} | EᵥEᵥᵢ | E₄*E₅ | |
| 160 | E_{1b}E₂E₃EᵢᵢE_{iib} | EᵥEᵥᵢ | E₄*E₅ | |
| 161 | E₁ₐE₂E₄ | EᵥEᵥᵢ | E₄*E₅ | |
| 162 | E_{1b}E₂E₄ | EᵥEᵥᵢ | E₄*E₅ | |
| 163 | E₁ₐE₂E₃E₄ | EᵥEᵥᵢ | E₄*E₅ | |
| 164 | E_{1b}E₂E₃E₄ | EᵥEᵥᵢ | E₄*E₅ | |
| 165 | E₁ₐE₂EᵢE₄ | EᵥEᵥᵢ | E₄*E₅ | |
| 166 | E_{1b}E₂EᵢE₄ | EᵥEᵥᵢ | E₄*E₅ | |
| 167 | E₁ₐE₂EᵢᵢE₄ | EᵥEᵥᵢ | E₄*E₅ | |
| 168 | E_{1b}E₂EᵢᵢE₄ | EᵥEᵥᵢ | E₄*E₅ | |
| 169 | E₁ₐE₂EᵢᵢE_{iib}E₄ | EᵥEᵥᵢ | E₄*E₅ | |
| 170 | E_{1b}E₂EᵢᵢE_{iib}E₄ | EᵥEᵥᵢ | E₄*E₅ | |
| 171 | E₁ₐE₂E₃EᵢE₄ | EᵥEᵥᵢ | E₄*E₅ | |
| 172 | E_{1b}E₂E₃EᵢE₄ | EᵥEᵥᵢ | E₄*E₅ | |
| 173 | E₁ₐE₂E₃EᵢᵢE₄ | EᵥEᵥᵢ | E₄*E₅ | |
| 174 | E_{1b}E₂E₃EᵢᵢE₄ | EᵥEᵥᵢ | E₄*E₅ | |
| 175 | E₁ₐE₂E₃EᵢᵢE_{iib}E₄ | EᵥEᵥᵢ | E₄*E₅ | |
| 176 | E_{1b}E₂E₃EᵢᵢE_{iib}E₄ | EᵥEᵥᵢ | E₄*E₅ | |
| 177 | E₁ₐE₂Eᵢᵢᵢ | EᵥEᵥᵢ | E₄*E₅ | |
| 178 | E_{1b}E₂Eᵢᵢᵢ | EᵥEᵥᵢ | E₄*E₅ | |
| 179 | E₁ₐE₂E₃Eᵢᵢᵢ | EᵥEᵥᵢ | E₄*E₅ | |
| 180 | E_{1b}E₂E₃Eᵢᵢᵢ | EᵥEᵥᵢ | E₄*E₅ | |
| 181 | E₁ₐE₂EᵢᵢᵢE₄ | EᵥEᵥᵢ | E₄*E₅ | |
| 182 | E_{1b}E₂EᵢᵢᵢE₄ | EᵥEᵥᵢ | E₄*E₅ | |
| 183 | E₁ₐE₂E₃EᵢᵢᵢE₄ | EᵥEᵥᵢ | E₄*E₅ | |
| 184 | E_{1b}E₂E₃EᵢᵢᵢE₄ | EᵥEᵥᵢ | E₄*E₅ | |
| 185 | E₁ₐE₂Eᵢᵥ | EᵥEᵥᵢ | E₄*E₅ | |
| 186 | E_{1b}E₂Eᵢᵥ | EᵥEᵥᵢ | E₄*E₅ | |
| 187 | E₁ₐE₂E₃Eᵢᵥ | EᵥEᵥᵢ | E₄*E₅ | |
| 188 | E_{1b}E₂E₃Eᵢᵥ | EᵥEᵥᵢ | E₄*E₅ | |
| 189 | E₁ₐE₂EᵢᵥE₄ | EᵥEᵥᵢ | E₄*E₅ | |
| 190 | E_{1b}E₂EᵢᵥE₄ | EᵥEᵥᵢ | E₄*E₅ | |
| 191 | E₁ₐE₂E₃EᵢᵥE₄ | EᵥEᵥᵢ | E₄*E₅ | |
| 192 | E_{1b}E₂E₃EᵢᵥE₄ | EᵥEᵥᵢ | E₄*E₅ | |
| 193 | E₁ₐE₂ | AlkLEᵥEᵥᵢ | | |
| 194 | E_{1b}E₂ | AlkLEᵥEᵥᵢ | | |
| 195 | E₁ₐE₂E₃ | AlkLEᵥEᵥᵢ | | |
| 196 | E_{1b}E₂E₃ | AlkLEᵥEᵥᵢ | | |
| 197 | E₁ₐE₂Eᵢ | AlkLEᵥEᵥᵢ | | |
| 198 | E_{1b}E₂Eᵢ | AlkLEᵥEᵥᵢ | | |
| 199 | E₁ₐE₂Eᵢᵢ | AlkLEᵥEᵥᵢ | | |
| 200 | E_{1b}E₂Eᵢᵢ | AlkLEᵥEᵥᵢ | | |
| 201 | E₁ₐE₂EᵢᵢE_{iib} | AlkLEᵥEᵥᵢ | | |
| 202 | E_{1b}E₂EᵢᵢE_{iib} | AlkLEᵥEᵥᵢ | | |
| 203 | E₁ₐE₂E₃Eᵢ | AlkLEᵥEᵥᵢ | | |
| 204 | E_{1b}E₂E₃Eᵢ | AlkLEᵥEᵥᵢ | | |
| 205 | E₁ₐE₂E₃Eᵢᵢ | AlkLEᵥEᵥᵢ | | |
| 206 | E_{1b}E₂E₃Eᵢᵢ | AlkLEᵥEᵥᵢ | | |
| 207 | E₁ₐE₂E₃EᵢᵢE_{iib} | AlkLEᵥEᵥᵢ | | |
| 208 | E_{1b}E₂E₃EᵢᵢE_{iib} | AlkLEᵥEᵥᵢ | | |
| 209 | E₁ₐE₂E₄ | AlkLEᵥEᵥᵢ | | |
| 210 | E_{1b}E₂E₄ | AlkLEᵥEᵥᵢ | | |
| 211 | E₁ₐE₂E₃E₄ | AlkLEᵥEᵥᵢ | | |
| 212 | E_{1b}E₂E₃E₄ | AlkLEᵥEᵥᵢ | | |
| 213 | E₁ₐE₂EᵢE₄ | AlkLEᵥEᵥᵢ | | |
| 214 | E_{1b}E₂EᵢE₄ | AlkLEᵥEᵥᵢ | | |
| 215 | E₁ₐE₂EᵢᵢE₄ | AlkLEᵥEᵥᵢ | | |
| 216 | E_{1b}E₂EᵢᵢE₄ | AlkLEᵥEᵥᵢ | | |
| 217 | E₁ₐE₂EᵢᵢE_{iib}E₄ | AlkLEᵥEᵥᵢ | | |
| 218 | E_{1b}E₂EᵢᵢE_{iib}E₄ | AlkLEᵥEᵥᵢ | | |
| 219 | E₁ₐE₂E₃EᵢE₄ | AlkLEᵥEᵥᵢ | | |
| 220 | E_{1b}E₂E₃EᵢE₄ | AlkLEᵥEᵥᵢ | | |
| 221 | E₁ₐE₂E₃EᵢᵢE₄ | AlkLEᵥEᵥᵢ | | |
| 222 | E_{1b}E₂E₃EᵢᵢE₄ | AlkLEᵥEᵥᵢ | | |
| 223 | E₁ₐE₂E₃EᵢᵢE_{iib}E₄ | AlkLEᵥEᵥᵢ | | |
| 224 | E_{1b}E₂E₃EᵢᵢE_{iib}E₄ | AlkLEᵥEᵥᵢ | | |
| 225 | E₁ₐE₂Eᵢᵢᵢ | AlkLEᵥEᵥᵢ | | |
| 226 | E_{1b}E₂Eᵢᵢᵢ | AlkLEᵥEᵥᵢ | | |
| 227 | E₁ₐE₂E₃Eᵢᵢᵢ | AlkLEᵥEᵥᵢ | | |
| 228 | E_{1b}E₂E₃Eᵢᵢᵢ | AlkLEᵥEᵥᵢ | | |
| 229 | E₁ₐE₂EᵢᵢᵢE₄ | AlkLEᵥEᵥᵢ | | |
| 230 | E_{1b}E₂EᵢᵢᵢE₄ | AlkLEᵥEᵥᵢ | | |
| 231 | E₁ₐE₂E₃EᵢᵢᵢE₄ | AlkLEᵥEᵥᵢ | | |
| 232 | E_{1b}E₂E₃EᵢᵢᵢE₄ | AlkLEᵥEᵥᵢ | | |
| 233 | E₁ₐE₂Eᵢᵥ | AlkLEᵥEᵥᵢ | | |
| 234 | E_{1b}E₂Eᵢᵥ | AlkLEᵥEᵥᵢ | | |
| 235 | E₁ₐE₂E₃Eᵢᵥ | AlkLEᵥEᵥᵢ | | |
| 236 | E_{1b}E₂E₃Eᵢᵥ | AlkLEᵥEᵥᵢ | | |
| 237 | E₁ₐE₂EᵢᵥE₄ | AlkLEᵥEᵥᵢ | | |
| 238 | E_{1b}E₂EᵢᵥE₄ | AlkLEᵥEᵥᵢ | | |
| 239 | E₁ₐE₂E₃EᵢᵥE₄ | AlkLEᵥEᵥᵢ | | |
| 240 | E_{1b}E₂E₃EᵢᵥE₄ | AlkLEᵥEᵥᵢ | | |
| 241 | E₁ₐE₂ | AlkLEᵥEᵥᵢ | E₄* | |
| 242 | E_{1b}E₂ | AlkLEᵥEᵥᵢ | E₄* | |
| 243 | E₁ₐE₂E₃ | AlkLEᵥEᵥᵢ | E₄* | |
| 244 | E_{1b}E₂E₃ | AlkLEᵥEᵥᵢ | E₄* | |
| 245 | E₁ₐE₂Eᵢ | AlkLEᵥEᵥᵢ | E₄* | |
| 246 | E_{1b}E₂Eᵢ | AlkLEᵥEᵥᵢ | E₄* | |
| 247 | E₁ₐE₂Eᵢᵢ | AlkLEᵥEᵥᵢ | E₄* | |
| 248 | E_{1b}E₂Eᵢᵢ | AlkLEᵥEᵥᵢ | E₄* | |
| 249 | E₁ₐE₂EᵢᵢE_{iib} | AlkLEᵥEᵥᵢ | E₄* | |
| 250 | E_{1b}E₂EᵢᵢE_{iib} | AlkLEᵥEᵥᵢ | E₄* | |
| 251 | E₁ₐE₂E₃Eᵢ | AlkLEᵥEᵥᵢ | E₄* | |
| 252 | E_{1b}E₂E₃Eᵢ | AlkLEᵥEᵥᵢ | E₄* | |
| 253 | E₁ₐE₂E₃Eᵢᵢ | AlkLEᵥEᵥᵢ | E₄* | |
| 254 | E_{1b}E₂E₃Eᵢᵢ | AlkLEᵥEᵥᵢ | E₄* | |
| 255 | E₁ₐE₂E₃EᵢᵢE_{iib} | AlkLEᵥEᵥᵢ | E₄* | |
| 256 | E_{1b}E₂E₃EᵢᵢE_{iib} | AlkLEᵥEᵥᵢ | E₄* | |
| 257 | E₁ₐE₂E₄ | AlkLEᵥEᵥᵢ | E₄* | |
| 258 | E_{1b}E₂E₄ | AlkLEᵥEᵥᵢ | E₄* | |
| 259 | E₁ₐE₂E₃E₄ | AlkLEᵥEᵥᵢ | E₄* | |
| 260 | E_{1b}E₂E₃E₄ | AlkLEᵥEᵥᵢ | E₄* | |
| 261 | E₁ₐE₂EᵢE₄ | AlkLEᵥEᵥᵢ | E₄* | |
| 262 | E_{1b}E₂EᵢE₄ | AlkLEᵥEᵥᵢ | E₄* | |
| 263 | E₁ₐE₂EᵢᵢE₄ | AlkLEᵥEᵥᵢ | E₄* | |
| 264 | E_{1b}E₂EᵢᵢE₄ | AlkLEᵥEᵥᵢ | E₄* | |
| 265 | E₁ₐE₂EᵢᵢE_{iib}E₄ | AlkLEᵥEᵥᵢ | E₄* | |
| 266 | E_{1b}E₂EᵢᵢE_{iib}E₄ | AlkLEᵥEᵥᵢ | E₄* | |
| 267 | E₁ₐE₂E₃EᵢE₄ | AlkLEᵥEᵥᵢ | E₄* | |
| 268 | E_{1b}E₂E₃EᵢE₄ | AlkLEᵥEᵥᵢ | E₄* | |
| 269 | E₁ₐE₂E₃EᵢᵢE₄ | AlkLEᵥEᵥᵢ | E₄* | |
| 270 | E_{1b}E₂E₃EᵢᵢE₄ | AlkLEᵥEᵥᵢ | E₄* | |
| 271 | E₁ₐE₂E₃EᵢᵢE_{iib}E₄ | AlkLEᵥEᵥᵢ | E₄* | |
| 272 | E_{1b}E₂E₃EᵢᵢE_{iib}E₄ | AlkLEᵥEᵥᵢ | E₄* | |
| 273 | E₁ₐE₂Eᵢᵢᵢ | AlkLEᵥEᵥᵢ | E₄* | |
| 274 | E_{1b}E₂Eᵢᵢᵢ | AlkLEᵥEᵥᵢ | E₄* | |
| 275 | E₁ₐE₂E₃Eᵢᵢᵢ | AlkLEᵥEᵥᵢ | E₄* | |
| 276 | E_{1b}E₂E₃Eᵢᵢᵢ | AlkLEᵥEᵥᵢ | E₄* | |
| 277 | E₁ₐE₂EᵢᵢᵢE₄ | AlkLEᵥEᵥᵢ | E₄* | |
| 278 | E_{1b}E₂EᵢᵢᵢE₄ | AlkLEᵥEᵥᵢ | E₄* | |
| 279 | E₁ₐE₂E₃EᵢᵢᵢE₄ | AlkLEᵥEᵥᵢ | E₄* | |
| 280 | E_{1b}E₂E₃EᵢᵢᵢE₄ | AlkLEᵥEᵥᵢ | E₄* | |
| 281 | E₁ₐE₂Eᵢᵥ | AlkLEᵥEᵥᵢ | E₄* | |
| 282 | E_{1b}E₂Eᵢᵥ | AlkLEᵥEᵥᵢ | E₄* | |
| 283 | E₁ₐE₂E₃Eᵢᵥ | AlkLEᵥEᵥᵢ | E₄* | |
| 284 | E_{1b}E₂E₃Eᵢᵥ | AlkLEᵥEᵥᵢ | E₄* | |
| 285 | E₁ₐE₂EᵢᵥE₄ | AlkLEᵥEᵥᵢ | E₄* | |
| 286 | E_{1b}E₂EᵢᵥE₄ | AlkLEᵥEᵥᵢ | E₄* | |
| 287 | E₁ₐE₂E₃EᵢᵥE₄ | AlkLEᵥEᵥᵢ | E₄* | |
| 288 | E_{1b}E₂E₃EᵢᵥE₄ | AlkLEᵥEᵥᵢ | E₄* | |
| 289 | E₁ₐE₂ | AlkLEᵥEᵥᵢ | E₅ | |
| 290 | E_{1b}E₂ | AlkLEᵥEᵥᵢ | E₅ | |
| 291 | E₁ₐE₂E₃ | AlkLEᵥEᵥᵢ | E₅ | |
| 292 | E_{1b}E₂E₃ | AlkLEᵥEᵥᵢ | E₅ | |
| 293 | E₁ₐE₂Eᵢ | AlkLEᵥEᵥᵢ | E₅ | |
| 294 | E_{1b}E₂Eᵢ | AlkLEᵥEᵥᵢ | E₅ | |
| 295 | E₁ₐE₂Eᵢᵢ | AlkLEᵥEᵥᵢ | E₅ | |
| 296 | E_{1b}E₂Eᵢᵢ | AlkLEᵥEᵥᵢ | E₅ | |
| 297 | E₁ₐE₂EᵢᵢE_{iib} | AlkLEᵥEᵥᵢ | E₅ | |
| 298 | E_{1b}E₂EᵢᵢE_{iib} | AlkLEᵥEᵥᵢ | E₅ | |
| 299 | E₁ₐE₂E₃Eᵢ | AlkLEᵥEᵥᵢ | E₅ | |
| 300 | E_{1b}E₂E₃Eᵢ | AlkLEᵥEᵥᵢ | E₅ | |
| 301 | E₁ₐE₂E₃Eᵢᵢ | AlkLEᵥEᵥᵢ | E₅ | |
| 302 | E_{1b}E₂E₃Eᵢᵢ | AlkLEᵥEᵥᵢ | E₅ | |
| 303 | E₁ₐE₂E₃EᵢᵢE_{iib} | AlkLEᵥEᵥᵢ | E₅ | |
| 304 | E_{1b}E₂E₃EᵢᵢE_{iib} | AlkLEᵥEᵥᵢ | E₅ | |
| 305 | E₁ₐE₂E₄ | AlkLEᵥEᵥᵢ | E₅ | |
| 306 | E_{1b}E₂E₄ | AlkLEᵥEᵥᵢ | E₅ | |
| 307 | E₁ₐE₂E₃E₄ | AlkLEᵥEᵥᵢ | E₅ | |
| 308 | E_{1b}E₂E₃E₄ | AlkLEᵥEᵥᵢ | E₅ | |
| 309 | E₁ₐE₂EᵢE₄ | AlkLEᵥEᵥᵢ | E₅ | |
| 310 | E_{1b}E₂EᵢE₄ | AlkLEᵥEᵥᵢ | E₅ | |
| 311 | E₁ₐE₂EᵢᵢE₄ | AlkLEᵥEᵥᵢ | E₅ | |
| 312 | E_{1b}E₂EᵢᵢE₄ | AlkLEᵥEᵥᵢ | E₅ | |
| 313 | E₁ₐE₂EᵢᵢE_{iib}E₄ | AlkLEᵥEᵥᵢ | E₅ | |
| 314 | E_{1b}E₂EᵢᵢE_{iib}E₄ | AlkLEᵥEᵥᵢ | E₅ | |
| 315 | E₁ₐE₂E₃EᵢE₄ | AlkLEᵥEᵥᵢ | E₅ | |
| 316 | E_{1b}E₂E₃EᵢE₄ | AlkLEᵥEᵥᵢ | E₅ | |
| 317 | E₁ₐE₂E₃EᵢᵢE₄ | AlkLEᵥEᵥᵢ | E₅ | |
| 318 | E_{1b}E₂E₃EᵢᵢE₄ | AlkLEᵥEᵥᵢ | E₅ | |
| 319 | E₁ₐE₂E₃EᵢᵢE_{iib}E₄ | AlkLEᵥEᵥᵢ | E₅ | |
| 320 | E_{1b}E₂E₃EᵢᵢE_{iib}E₄ | AlkLEᵥEᵥᵢ | E₅ | |
| 321 | E₁ₐE₂Eᵢᵢᵢ | AlkLEᵥEᵥᵢ | E₅ | |
| 322 | E_{1b}E₂Eᵢᵢᵢ | AlkLEᵥEᵥᵢ | E₅ | |
| 323 | E₁ₐE₂E₃Eᵢᵢᵢ | AlkLEᵥEᵥᵢ | E₅ | |
| 324 | E_{1b}E₂E₃Eᵢᵢᵢ | AlkLEᵥEᵥᵢ | E₅ | |
| 325 | E₁ₐE₂EᵢᵢᵢE₄ | AlkLEᵥEᵥᵢ | E₅ | |
| 326 | E_{1b}E₂EᵢᵢᵢE₄ | AlkLEᵥEᵥᵢ | E₅ | |
| 327 | E₁ₐE₂E₃EᵢᵢᵢE₄ | AlkLEᵥEᵥᵢ | E₅ | |
| 328 | E_{1b}E₂E₃EᵢᵢᵢE₄ | AlkLEᵥEᵥᵢ | E₅ | |
| 329 | E₁ₐE₂Eᵢᵥ | AlkLEᵥEᵥᵢ | E₅ | |
| 330 | E_{1b}E₂Eᵢᵥ | AlkLEᵥEᵥᵢ | E₅ | |
| 331 | E₁ₐE₂E₃Eᵢᵥ | AlkLEᵥEᵥᵢ | E₅ | |
| 332 | E_{1b}E₂E₃Eᵢᵥ | AlkLEᵥEᵥᵢ | E₅ | |
| 333 | E₁ₐE₂EᵢᵥE₄ | AlkLEᵥEᵥᵢ | E₅ | |
| 334 | E_{1b}E₂EᵢᵥE₄ | AlkLEᵥEᵥᵢ | E₅ | |
| 335 | E₁ₐE₂E₃EᵢᵥE₄ | AlkLEᵥEᵥᵢ | E₅ | |
| 336 | E_{1b}E₂E₃EᵢᵥE₄ | AlkLEᵥEᵥᵢ | E₅ | |
| 337 | E₁ₐE₂ | AlkLEᵥEᵥᵢ | E₄*E₅ | |
| 338 | E_{1b}E₂ | AlkLEᵥEᵥᵢ | E₄*E₅ | |
| 339 | E₁ₐE₂E₃ | AlkLEᵥEᵥᵢ | E₄*E₅ | |
| 340 | E_{1b}E₂E₃ | AlkLEᵥEᵥᵢ | E₄*E₅ | |
| 341 | E₁ₐE₂Eᵢ | AlkLEᵥEᵥᵢ | E₄*E₅ | |
| 342 | E_{1b}E₂Eᵢ | AlkLEᵥEᵥᵢ | E₄*E₅ | |
| 343 | E₁ₐE₂Eᵢᵢ | AlkLEᵥEᵥᵢ | E₄*E₅ | |
| 344 | E_{1b}E₂Eᵢᵢ | AlkLEᵥEᵥᵢ | E₄*E₅ | |
| 345 | E₁ₐE₂EᵢᵢE_{iib} | AlkLEᵥEᵥᵢ | E₄*E₅ | |
| 346 | E_{1b}E₂EᵢᵢE_{iib} | AlkLEᵥEᵥᵢ | E₄*E₅ | |
| 347 | E₁ₐE₂E₃Eᵢ | AlkLEᵥEᵥᵢ | E₄*E₅ | |
| 348 | E_{1b}E₂E₃Eᵢ | AlkLEᵥEᵥᵢ | E₄*E₅ | |
| 349 | E₁ₐE₂E₃Eᵢᵢ | AlkLEᵥEᵥᵢ | E₄*E₅ | |
| 350 | E_{1b}E₂E₃Eᵢᵢ | AlkLEᵥEᵥᵢ | E₄*E₅ | |
| 351 | E₁ₐE₂E₃EᵢᵢE_{iib} | AlkLEᵥEᵥᵢ | E₄*E₅ | |
| 352 | E_{1b}E₂E₃EᵢᵢE_{iib} | AlkLEᵥEᵥᵢ | E₄*E₅ | |
| 353 | E₁ₐE₂E₄ | AlkLEᵥEᵥᵢ | E₄*E₅ | |
| 354 | E_{1b}E₂E₄ | AlkLEᵥEᵥᵢ | E₄*E₅ | |
| 355 | E₁ₐE₂E₃E₄ | AlkLEᵥEᵥᵢ | E₄*E₅ | |
| 356 | E_{1b}E₂E₃E₄ | AlkLEᵥEᵥᵢ | E₄*E₅ | |
| 357 | E₁ₐE₂EᵢE₄ | AlkLEᵥEᵥᵢ | E₄*E₅ | |
| 358 | E_{1b}E₂EᵢE₄ | AlkLEᵥEᵥᵢ | E₄*E₅ | |
| 359 | E₁ₐE₂EᵢᵢE₄ | AlkLEᵥEᵥᵢ | E₄*E₅ | |
| 360 | E_{1b}E₂EᵢᵢE₄ | AlkLEᵥEᵥᵢ | E₄*E₅ | |
| 361 | E₁ₐE₂EᵢᵢE_{iib}E₄ | AlkLEᵥEᵥᵢ | E₄*E₅ | |
| 362 | E_{1b}E₂EᵢᵢE_{iib}E₄ | AlkLEᵥEᵥᵢ | E₄*E₅ | |
| 363 | E₁ₐE₂E₃EᵢE₄ | AlkLEᵥEᵥᵢ | E₄*E₅ | |
| 364 | E_{1b}E₂E₃EᵢE₄ | AlkLEᵥEᵥᵢ | E₄*E₅ | |
| 365 | E₁ₐE₂E₃EᵢᵢE₄ | AlkLEᵥEᵥᵢ | E₄*E₅ | |
| 366 | E_{1b}E₂E₃EᵢᵢE₄ | AlkLEᵥEᵥᵢ | E₄*E₅ | |
| 367 | E₁ₐE₂E₃EᵢᵢE_{iib}E₄ | AlkLEᵥEᵥᵢ | E₄*E₅ | |
| 368 | E_{1b}E₂E₃EᵢᵢE_{iib}E₄ | AlkLEᵥEᵥᵢ | E₄*E₅ | |
| 369 | E₁ₐE₂Eᵢᵢᵢ | AlkLEᵥEᵥᵢ | E₄*E₅ | |
| 370 | E_{1b}E₂Eᵢᵢᵢ | AlkLEᵥEᵥᵢ | E₄*E₅ | |
| 371 | E₁ₐE₂E₃Eᵢᵢᵢ | AlkLEᵥEᵥᵢ | E₄*E₅ | |
| 372 | E_{1b}E₂E₃Eᵢᵢᵢ | AlkLEᵥEᵥᵢ | E₄*E₅ | |
| 373 | E₁ₐE₂EᵢᵢᵢE₄ | AlkLEᵥEᵥᵢ | E₄*E₅ | |
| 374 | E_{1b}E₂EᵢᵢᵢE₄ | AlkLEᵥEᵥᵢ | E₄*E₅ | |
| 375 | E₁ₐE₂E₃EᵢᵢᵢE₄ | AlkLEᵥEᵥᵢ | E₄*E₅ | |
| 376 | E_{1b}E₂E₃EᵢᵢᵢE₄ | AlkLEᵥEᵥᵢ | E₄*E₅ | |
| 377 | E₁ₐE₂Eᵢᵥ | AlkLEᵥEᵥᵢ | E₄*E₅ | |
| 378 | E_{1b}E₂Eᵢᵥ | AlkLEᵥEᵥᵢ | E₄*E₅ | |
| 379 | E₁ₐE₂E₃Eᵢᵥ | AlkLEᵥEᵥᵢ | E₄*E₅ | |
| 380 | E_{1b}E₂E₃Eᵢᵥ | AlkLEᵥEᵥᵢ | E₄*E₅ | |
| 381 | E₁ₐE₂EᵢᵥE₄ | AlkLEᵥEᵥᵢ | E₄*E₅ | |
| 382 | E_{1b}E₂EᵢᵥE₄ | AlkLEᵥEᵥᵢ | E₄*E₅ | |
| 383 | E₁ₐE₂E₃EᵢᵥE₄ | AlkLEᵥEᵥᵢ | E₄*E₅ | |
| 384 | E_{1b}E₂E₃EᵢᵥE₄ | AlkLEᵥEᵥᵢ | E₄*E₅ | |
| 385 | E₁ₐE₂ | EᵥEᵥᵢ | | Eₐ |
| 386 | E_{1b}E₂ | EᵥEᵥᵢ | | Eₐ |
| 387 | E₁ₐE₂E₃ | EᵥEᵥᵢ | | Eₐ |
| 388 | E_{1b}E₂E₃ | EᵥEᵥᵢ | | Eₐ |
| 389 | E₁ₐE₂Eᵢ | EᵥEᵥᵢ | | Eₐ |
| 390 | E_{1b}E₂Eᵢ | EᵥEᵥᵢ | | Eₐ |
| 391 | E₁ₐE₂Eᵢᵢ | EᵥEᵥᵢ | | Eₐ |
| 392 | E_{1b}E₂Eᵢᵢ | EᵥEᵥᵢ | | Eₐ |
| 393 | E₁ₐE₂EᵢᵢE_{iib} | EᵥEᵥᵢ | | Eₐ |
| 394 | E_{1b}E₂EᵢᵢE_{iib} | EᵥEᵥᵢ | | Eₐ |
| 395 | E₁ₐE₂E₃Eᵢ | EᵥEᵥᵢ | | Eₐ |
| 396 | E_{1b}E₂E₃Eᵢ | EᵥEᵥᵢ | | Eₐ |
| 397 | E₁ₐE₂E₃Eᵢᵢ | EᵥEᵥᵢ | | Eₐ |
| 398 | E_{1b}E₂E₃Eᵢᵢ | EᵥEᵥᵢ | | Eₐ |
| 399 | E₁ₐE₂E₃EᵢᵢE_{iib} | EᵥEᵥᵢ | | Eₐ |
| 400 | E_{1b}E₂E₃EᵢᵢE_{iib} | EᵥEᵥᵢ | | Eₐ |
| 401 | E₁ₐE₂E₄ | EᵥEᵥᵢ | | Eₐ |
| 402 | E_{1b}E₂E₄ | EᵥEᵥᵢ | | Eₐ |
| 403 | E₁ₐE₂E₃E₄ | EᵥEᵥᵢ | | Eₐ |
| 404 | E_{1b}E₂E₃E₄ | EᵥEᵥᵢ | | Eₐ |
| 405 | E₁ₐE₂EᵢE₄ | EᵥEᵥᵢ | | Eₐ |
| 406 | E_{1b}E₂EᵢE₄ | EᵥEᵥᵢ | | Eₐ |
| 407 | E₁ₐE₂EᵢᵢE₄ | EᵥEᵥᵢ | | Eₐ |
| 408 | E_{1b}E₂EᵢᵢE₄ | EᵥEᵥᵢ | | Eₐ |
| 409 | E₁ₐE₂EᵢᵢE_{iib}E₄ | EᵥEᵥᵢ | | Eₐ |
| 410 | E_{1b}E₂EᵢᵢE_{iib}E₄ | EᵥEᵥᵢ | | Eₐ |
| 411 | E₁ₐE₂E₃EᵢE₄ | EᵥEᵥᵢ | | Eₐ |
| 412 | E_{1b}E₂E₃EᵢE₄ | EᵥEᵥᵢ | | Eₐ |
| 413 | E₁ₐE₂E₃EᵢᵢE₄ | EᵥEᵥᵢ | | Eₐ |
| 414 | E_{1b}E₂E₃EᵢᵢE₄ | EᵥEᵥᵢ | | Eₐ |
| 415 | E₁ₐE₂E₃EᵢᵢE_{iib}E₄ | EᵥEᵥᵢ | | Eₐ |
| 416 | E_{1b}E₂E₃EᵢᵢE_{iib}E₄ | EᵥEᵥᵢ | | Eₐ |
| 417 | E₁ₐE₂Eᵢᵢᵢ | EᵥEᵥᵢ | | Eₐ |
| 418 | E_{1b}E₂Eᵢᵢᵢ | EᵥEᵥᵢ | | Eₐ |
| 419 | E₁ₐE₂E₃Eᵢᵢᵢ | EᵥEᵥᵢ | | Eₐ |
| 420 | E_{1b}E₂E₃Eᵢᵢᵢ | EᵥEᵥᵢ | | Eₐ |
| 421 | E₁ₐE₂EᵢᵢᵢE₄ | EᵥEᵥᵢ | | Eₐ |
| 422 | E_{1b}E₂EᵢᵢᵢE₄ | EᵥEᵥᵢ | | Eₐ |
| 423 | E₁ₐE₂E₃EᵢᵢᵢE₄ | EᵥEᵥᵢ | | Eₐ |
| 424 | E_{1b}E₂E₃EᵢᵢᵢE₄ | EᵥEᵥᵢ | | Eₐ |
| 425 | E₁ₐE₂Eᵢᵥ | EᵥEᵥᵢ | | Eₐ |
| 426 | E_{1b}E₂Eᵢᵥ | EᵥEᵥᵢ | | Eₐ |
| 427 | E₁ₐE₂E₃Eᵢᵥ | EᵥEᵥᵢ | | Eₐ |
| 428 | E_{1b}E₂E₃Eᵢᵥ | EᵥEᵥᵢ | | Eₐ |
| 429 | E₁ₐE₂EᵢᵥE₄ | EᵥEᵥᵢ | | Eₐ |
| 430 | E_{1b}E₂EᵢᵥE₄ | EᵥEᵥᵢ | | Eₐ |
| 431 | E₁ₐE₂E₃EᵢᵥE₄ | EᵥEᵥᵢ | | Eₐ |
| 432 | E_{1b}E₂E₃EᵢᵥE₄ | EᵥEᵥᵢ | | Eₐ |
| 433 | E₁ₐE₂ | EᵥEᵥᵢ | E₄* | Eₐ |
| 434 | E_{1b}E₂ | EᵥEᵥᵢ | E₄* | Eₐ |
| 435 | E₁ₐE₂E₃ | EᵥEᵥᵢ | E₄* | Eₐ |
| 436 | E_{1b}E₂E₃ | EᵥEᵥᵢ | E₄* | Eₐ |
| 437 | E₁ₐE₂Eᵢ | EᵥEᵥᵢ | E₄* | Eₐ |
| 438 | E_{1b}E₂Eᵢ | EᵥEᵥᵢ | E₄* | Eₐ |
| 439 | E₁ₐE₂Eᵢᵢ | EᵥEᵥᵢ | E₄* | Eₐ |
| 440 | E_{1b}E₂Eᵢᵢ | EᵥEᵥᵢ | E₄* | Eₐ |
| 441 | E₁ₐE₂EᵢᵢE_{iib} | EᵥEᵥᵢ | E₄* | Eₐ |
| 442 | E_{1b}E₂EᵢᵢE_{iib} | EᵥEᵥᵢ | E₄* | Eₐ |
| 443 | E₁ₐE₂E₃Eᵢ | EᵥEᵥᵢ | E₄* | Eₐ |
| 444 | E_{1b}E₂E₃Eᵢ | EᵥEᵥᵢ | E₄* | Eₐ |
| 445 | E₁ₐE₂E₃Eᵢᵢ | EᵥEᵥᵢ | E₄* | Eₐ |
| 446 | E_{1b}E₂E₃Eᵢᵢ | EᵥEᵥᵢ | E₄* | Eₐ |
| 447 | E₁ₐE₂E₃EᵢᵢE_{iib} | EᵥEᵥᵢ | E₄* | Eₐ |
| 448 | E_{1b}E₂E₃EᵢᵢE_{iib} | EᵥEᵥᵢ | E₄* | Eₐ |
| 449 | E₁ₐE₂E₄ | EᵥEᵥᵢ | E₄* | Eₐ |
| 450 | E_{1b}E₂E₄ | EᵥEᵥᵢ | E₄* | Eₐ |
| 451 | E₁ₐE₂E₃E₄ | EᵥEᵥᵢ | E₄* | Eₐ |
| 452 | E_{1b}E₂E₃E₄ | EᵥEᵥᵢ | E₄* | Eₐ |
| 453 | E₁ₐE₂EᵢE₄ | EᵥEᵥᵢ | E₄* | Eₐ |
| 454 | E_{1b}E₂EᵢE₄ | EᵥEᵥᵢ | E₄* | Eₐ |
| 455 | E₁ₐE₂EᵢᵢE₄ | EᵥEᵥᵢ | E₄* | Eₐ |
| 456 | E_{1b}E₂EᵢᵢE₄ | EᵥEᵥᵢ | E₄* | Eₐ |
| 457 | E₁ₐE₂EᵢᵢE_{iib}E₄ | EᵥEᵥᵢ | E₄* | Eₐ |
| 458 | E_{1b}E₂EᵢᵢE_{iib}E₄ | EᵥEᵥᵢ | E₄* | Eₐ |
| 459 | E₁ₐE₂E₃EᵢE₄ | EᵥEᵥᵢ | E₄* | Eₐ |
| 460 | E_{1b}E₂E₃EᵢE₄ | EᵥEᵥᵢ | E₄* | Eₐ |
| 461 | E₁ₐE₂E₃EᵢᵢE₄ | EᵥEᵥᵢ | E₄* | Eₐ |
| 462 | E_{1b}E₂E₃EᵢᵢE₄ | EᵥEᵥᵢ | E₄* | Eₐ |
| 463 | E₁ₐE₂E₃EᵢᵢE_{iib}E₄ | EᵥEᵥᵢ | E₄* | Eₐ |
| 464 | E_{1b}E₂E₃EᵢᵢE_{iib}E₄ | EᵥEᵥᵢ | E₄* | Eₐ |
| 465 | E₁ₐE₂Eᵢᵢᵢ | EᵥEᵥᵢ | E₄* | Eₐ |
| 466 | E_{1b}E₂Eᵢᵢᵢ | EᵥEᵥᵢ | E₄* | Eₐ |
| 467 | E₁ₐE₂E₃Eᵢᵢᵢ | EᵥEᵥᵢ | E₄* | Eₐ |
| 468 | E_{1b}E₂E₃Eᵢᵢᵢ | EᵥEᵥᵢ | E₄* | Eₐ |
| 469 | E₁ₐE₂EᵢᵢᵢE₄ | EᵥEᵥᵢ | E₄* | Eₐ |
| 470 | E_{1b}E₂EᵢᵢᵢE₄ | EᵥEᵥᵢ | E₄* | Eₐ |
| 471 | E₁ₐE₂E₃EᵢᵢᵢE₄ | EᵥEᵥᵢ | E₄* | Eₐ |
| 472 | E_{1b}E₂E₃EᵢᵢᵢE₄ | EᵥEᵥᵢ | E₄* | Eₐ |
| 473 | E₁ₐE₂Eᵢᵥ | EᵥEᵥᵢ | E₄* | Eₐ |
| 474 | E_{1b}E₂Eᵢᵥ | EᵥEᵥᵢ | E₄* | Eₐ |
| 475 | E₁ₐE₂E₃Eᵢᵥ | EᵥEᵥᵢ | E₄* | Eₐ |
| 476 | E_{1b}E₂E₃Eᵢᵥ | EᵥEᵥᵢ | E₄* | Eₐ |
| 477 | E₁ₐE₂EᵢᵥE₄ | EᵥEᵥᵢ | E₄* | Eₐ |
| 478 | E_{1b}E₂EᵢᵥE₄ | EᵥEᵥᵢ | E₄* | Eₐ |
| 479 | E₁ₐE₂E₃EᵢᵥE₄ | EᵥEᵥᵢ | E₄* | Eₐ |
| 480 | E_{1b}E₂E₃EᵢᵥE₄ | EᵥEᵥᵢ | E₄* | Eₐ |
| 481 | E₁ₐE₂ | EᵥEᵥᵢ | E₅ | Eₐ |
| 482 | E_{1b}E₂ | EᵥEᵥᵢ | E₅ | Eₐ |
| 483 | E₁ₐE₂E₃ | EᵥEᵥᵢ | E₅ | Eₐ |
| 484 | E_{1b}E₂E₃ | EᵥEᵥᵢ | E₅ | Eₐ |
| 485 | E₁ₐE₂Eᵢ | EᵥEᵥᵢ | E₅ | Eₐ |
| 486 | E_{1b}E₂Eᵢ | EᵥEᵥᵢ | E₅ | Eₐ |
| 487 | E₁ₐE₂Eᵢᵢ | EᵥEᵥᵢ | E₅ | Eₐ |
| 488 | E_{1b}E₂Eᵢᵢ | EᵥEᵥᵢ | E₅ | Eₐ |
| 489 | E₁ₐE₂EᵢᵢE_{iib} | EᵥEᵥᵢ | E₅ | Eₐ |
| 490 | E_{1b}E₂EᵢᵢE_{iib} | EᵥEᵥᵢ | E₅ | Eₐ |
| 491 | E₁ₐE₂E₃Eᵢ | EᵥEᵥᵢ | E₅ | Eₐ |
| 492 | E_{1b}E₂E₃Eᵢ | EᵥEᵥᵢ | E₅ | Eₐ |
| 493 | E₁ₐE₂E₃Eᵢᵢ | EᵥEᵥᵢ | E₅ | Eₐ |
| 494 | E_{1b}E₂E₃Eᵢᵢ | EᵥEᵥᵢ | E₅ | Eₐ |
| 495 | E₁ₐE₂E₃EᵢᵢE_{iib} | EᵥEᵥᵢ | E₅ | Eₐ |
| 496 | E_{1b}E₂E₃EᵢᵢE_{iib} | EᵥEᵥᵢ | E₅ | Eₐ |
| 497 | E₁ₐE₂E₄ | EᵥEᵥᵢ | E₅ | Eₐ |
| 498 | E_{1b}E₂E₄ | EᵥEᵥᵢ | E₅ | Eₐ |
| 499 | E₁ₐE₂E₃E₄ | EᵥEᵥᵢ | E₅ | Eₐ |
| 500 | E_{1b}E₂E₃E₄ | EᵥEᵥᵢ | E₅ | Eₐ |
| 501 | E₁ₐE₂EᵢE₄ | EᵥEᵥᵢ | E₅ | Eₐ |
| 502 | E_{1b}E₂EᵢE₄ | EᵥEᵥᵢ | E₅ | Eₐ |
| 503 | E₁ₐE₂EᵢᵢE₄ | EᵥEᵥᵢ | E₅ | Eₐ |
| 504 | E_{1b}E₂EᵢᵢE₄ | EᵥEᵥᵢ | E₅ | Eₐ |
| 505 | E₁ₐE₂EᵢᵢE_{iib}E₄ | EᵥEᵥᵢ | E₅ | Eₐ |
| 506 | E_{1b}E₂EᵢᵢE_{iib}E₄ | EᵥEᵥᵢ | E₅ | Eₐ |
| 507 | E₁ₐE₂E₃EᵢE₄ | EᵥEᵥᵢ | E₅ | Eₐ |
| 508 | E_{1b}E₂E₃EᵢE₄ | EᵥEᵥᵢ | E₅ | Eₐ |
| 509 | E₁ₐE₂E₃EᵢᵢE₄ | EᵥEᵥᵢ | E₅ | Eₐ |
| 510 | E_{1b}E₂E₃EᵢᵢE₄ | EᵥEᵥᵢ | E₅ | Eₐ |
| 511 | E₁ₐE₂E₃EᵢᵢE_{iib}E₄ | EᵥEᵥᵢ | E₅ | Eₐ |
| 512 | E_{1b}E₂E₃EᵢᵢE_{iib}E₄ | EᵥEᵥᵢ | E₅ | Eₐ |
| 513 | E₁ₐE₂Eᵢᵢᵢ | EᵥEᵥᵢ | E₅ | Eₐ |
| 514 | E_{1b}E₂Eᵢᵢᵢ | EᵥEᵥᵢ | E₅ | Eₐ |
| 515 | E₁ₐE₂E₃Eᵢᵢᵢ | EᵥEᵥᵢ | E₅ | Eₐ |
| 516 | E_{1b}E₂E₃Eᵢᵢᵢ | EᵥEᵥᵢ | E₅ | Eₐ |
| 517 | E₁ₐE₂EᵢᵢᵢE₄ | EᵥEᵥᵢ | E₅ | Eₐ |
| 518 | E_{1b}E₂EᵢᵢᵢE₄ | EᵥEᵥᵢ | E₅ | Eₐ |
| 519 | E₁ₐE₂E₃EᵢᵢᵢE₄ | EᵥEᵥᵢ | E₅ | Eₐ |
| 520 | E_{1b}E₂E₃EᵢᵢᵢE₄ | EᵥEᵥᵢ | E₅ | Eₐ |
| 521 | E₁ₐE₂Eᵢᵥ | EᵥEᵥᵢ | E₅ | Eₐ |
| 522 | E_{1b}E₂Eᵢᵥ | EᵥEᵥᵢ | E₅ | Eₐ |
| 523 | E₁ₐE₂E₃Eᵢᵥ | EᵥEᵥᵢ | E₅ | Eₐ |
| 524 | E_{1b}E₂E₃Eᵢᵥ | EᵥEᵥᵢ | E₅ | Eₐ |
| 525 | E₁ₐE₂EᵢᵥE₄ | EᵥEᵥᵢ | E₅ | Eₐ |
| 526 | E_{1b}E₂EᵢᵥE₄ | EᵥEᵥᵢ | E₅ | Eₐ |
| 527 | E₁ₐE₂E₃EᵢᵥE₄ | EᵥEᵥᵢ | E₅ | Eₐ |
| 528 | E_{1b}E₂E₃EᵢᵥE₄ | EᵥEᵥᵢ | E₅ | Eₐ |
| 529 | E₁ₐE₂ | EᵥEᵥᵢ | E₄*E₅ | Eₐ |
| 530 | E_{1b}E₂ | EᵥEᵥᵢ | E₄*E₅ | Eₐ |
| 531 | E₁ₐE₂E₃ | EᵥEᵥᵢ | E₄*E₅ | Eₐ |
| 532 | E_{1b}E₂E₃ | EᵥEᵥᵢ | E₄*E₅ | Eₐ |
| 533 | E₁ₐE₂Eᵢ | EᵥEᵥᵢ | E₄*E₅ | Eₐ |
| 534 | E_{1b}E₂Eᵢ | EᵥEᵥᵢ | E₄*E₅ | Eₐ |
| 535 | E₁ₐE₂Eᵢᵢ | EᵥEᵥᵢ | E₄*E₅ | Eₐ |
| 536 | E_{1b}E₂Eᵢᵢ | EᵥEᵥᵢ | E₄*E₅ | Eₐ |
| 537 | E₁ₐE₂EᵢᵢE_{iib} | EᵥEᵥᵢ | E₄*E₅ | Eₐ |
| 538 | E_{1b}E₂EᵢᵢE_{iib} | EᵥEᵥᵢ | E₄*E₅ | Eₐ |
| 539 | E₁ₐE₂E₃Eᵢ | EᵥEᵥᵢ | E₄*E₅ | Eₐ |
| 540 | E_{1b}E₂E₃Eᵢ | EᵥEᵥᵢ | E₄*E₅ | Eₐ |
| 541 | E₁ₐE₂E₃Eᵢᵢ | EᵥEᵥᵢ | E₄*E₅ | Eₐ |
| 542 | E_{1b}E₂E₃Eᵢᵢ | EᵥEᵥᵢ | E₄*E₅ | Eₐ |
| 543 | E₁ₐE₂E₃EᵢᵢE_{iib} | EᵥEᵥᵢ | E₄*E₅ | Eₐ |
| 544 | E_{1b}E₂E₃EᵢᵢE_{iib} | EᵥEᵥᵢ | E₄*E₅ | Eₐ |
| 545 | E₁ₐE₂E₄ | EᵥEᵥᵢ | E₄*E₅ | Eₐ |
| 546 | E_{1b}E₂E₄ | EᵥEᵥᵢ | E₄*E₅ | Eₐ |
| 547 | E₁ₐE₂E₃E₄ | EᵥEᵥᵢ | E₄*E₅ | Eₐ |
| 548 | E_{1b}E₂E₃E₄ | EᵥEᵥᵢ | E₄*E₅ | Eₐ |
| 549 | E₁ₐE₂EᵢE₄ | EᵥEᵥᵢ | E₄*E₅ | Eₐ |
| 550 | E_{1b}E₂EᵢE₄ | EᵥEᵥᵢ | E₄*E₅ | Eₐ |
| 551 | E₁ₐE₂EᵢᵢE₄ | EᵥEᵥᵢ | E₄*E₅ | Eₐ |
| 552 | E_{1b}E₂EᵢᵢE₄ | EᵥEᵥᵢ | E₄*E₅ | Eₐ |
| 553 | E₁ₐE₂EᵢᵢE_{iib}E₄ | EᵥEᵥᵢ | E₄*E₅ | Eₐ |
| 554 | E_{1b}E₂EᵢᵢE_{iib}E₄ | EᵥEᵥᵢ | E₄*E₅ | Eₐ |
| 555 | E₁ₐE₂E₃EᵢE₄ | EᵥEᵥᵢ | E₄*E₅ | Eₐ |
| 556 | E_{1b}E₂E₃EᵢE₄ | EᵥEᵥᵢ | E₄*E₅ | Eₐ |
| 557 | E₁ₐE₂E₃EᵢᵢE₄ | EᵥEᵥᵢ | E₄*E₅ | Eₐ |
| 558 | E_{1b}E₂E₃EᵢᵢE₄ | EᵥEᵥᵢ | E₄*E₅ | Eₐ |
| 559 | E₁ₐE₂E₃EᵢᵢE_{iib}E₄ | EᵥEᵥᵢ | E₄*E₅ | Eₐ |
| 560 | E_{1b}E₂E₃EᵢᵢE_{iib}E₄ | EᵥEᵥᵢ | E₄*E₅ | Eₐ |
| 561 | E₁ₐE₂Eᵢᵢᵢ | EᵥEᵥᵢ | E₄*E₅ | Eₐ |
| 562 | E_{1b}E₂Eᵢᵢᵢ | EᵥEᵥᵢ | E₄*E₅ | Eₐ |
| 563 | E₁ₐE₂E₃Eᵢᵢᵢ | EᵥEᵥᵢ | E₄*E₅ | Eₐ |
| 564 | E_{1b}E₂E₃Eᵢᵢᵢ | EᵥEᵥᵢ | E₄*E₅ | Eₐ |
| 565 | E₁ₐE₂EᵢᵢᵢE₄ | EᵥEᵥᵢ | E₄*E₅ | Eₐ |
| 566 | E_{1b}E₂EᵢᵢᵢE₄ | EᵥEᵥᵢ | E₄*E₅ | Eₐ |
| 567 | E₁ₐE₂E₃EᵢᵢᵢE₄ | EᵥEᵥᵢ | E₄*E₅ | Eₐ |
| 568 | E_{1b}E₂E₃EᵢᵢᵢE₄ | EᵥEᵥᵢ | E₄*E₅ | Eₐ |
| 569 | E₁ₐE₂Eᵢᵥ | EᵥEᵥᵢ | E₄*E₅ | Eₐ |
| 570 | E_{1b}E₂Eᵢᵥ | EᵥEᵥᵢ | E₄*E₅ | Eₐ |
| 571 | E₁ₐE₂E₃Eᵢᵥ | EᵥEᵥᵢ | E₄*E₅ | Eₐ |
| 572 | E_{1b}E₂E₃Eᵢᵥ | EᵥEᵥᵢ | E₄*E₅ | Eₐ |
| 573 | E₁ₐE₂EᵢᵥE₄ | EᵥEᵥᵢ | E₄*E₅ | Eₐ |
| 574 | E_{1b}E₂EᵢᵥE₄ | EᵥEᵥᵢ | E₄*E₅ | Eₐ |
| 575 | E₁ₐE₂E₃EᵢᵥE₄ | EᵥEᵥᵢ | E₄*E₅ | Eₐ |
| 576 | E_{1b}E₂E₃EᵢᵥE₄ | EᵥEᵥᵢ | E₄*E₅ | Eₐ |
| 577 | E₁ₐE₂ | AlkLEᵥEᵥᵢ | | Eₐ |
| 578 | E_{1b}E₂ | AlkLEᵥEᵥᵢ | | Eₐ |
| 579 | E₁ₐE₂E₃ | AlkLEᵥEᵥᵢ | | Eₐ |
| 580 | E_{1b}E₂E₃ | AlkLEᵥEᵥᵢ | | Eₐ |
| 581 | E₁ₐE₂Eᵢ | AlkLEᵥEᵥᵢ | | Eₐ |
| 582 | E_{1b}E₂Eᵢ | AlkLEᵥEᵥᵢ | | Eₐ |
| 583 | E₁ₐE₂Eᵢᵢ | AlkLEᵥEᵥᵢ | | Eₐ |
| 584 | E_{1b}E₂Eᵢᵢ | AlkLEᵥEᵥᵢ | | Eₐ |
| 585 | E₁ₐE₂EᵢᵢE_{iib} | AlkLEᵥEᵥᵢ | | Eₐ |
| 586 | E_{1b}E₂EᵢᵢE_{iib} | AlkLEᵥEᵥᵢ | | Eₐ |
| 587 | E₁ₐE₂E₃Eᵢ | AlkLEᵥEᵥᵢ | | Eₐ |
| 588 | E_{1b}E₂E₃Eᵢ | AlkLEᵥEᵥᵢ | | Eₐ |
| 589 | E₁ₐE₂E₃Eᵢᵢ | AlkLEᵥEᵥᵢ | | Eₐ |
| 590 | E_{1b}E₂E₃Eᵢᵢ | AlkLEᵥEᵥᵢ | | Eₐ |
| 591 | E₁ₐE₂E₃EᵢᵢE_{iib} | AlkLEᵥEᵥᵢ | | Eₐ |
| 592 | E_{1b}E₂E₃EᵢᵢE_{iib} | AlkLEᵥEᵥᵢ | | Eₐ |
| 593 | E₁ₐE₂E₄ | AlkLEᵥEᵥᵢ | | Eₐ |
| 594 | E_{1b}E₂E₄ | AlkLEᵥEᵥᵢ | | Eₐ |
| 595 | E₁ₐE₂E₃E₄ | AlkLEᵥEᵥᵢ | | Eₐ |
| 596 | E_{1b}E₂E₃E₄ | AlkLEᵥEᵥᵢ | | Eₐ |
| 597 | E₁ₐE₂EᵢE₄ | AlkLEᵥEᵥᵢ | | Eₐ |
| 598 | E_{1b}E₂EᵢE₄ | AlkLEᵥEᵥᵢ | | Eₐ |
| 599 | E₁ₐE₂EᵢᵢE₄ | AlkLEᵥEᵥᵢ | | Eₐ |
| 600 | E_{1b}E₂EᵢᵢE₄ | AlkLEᵥEᵥᵢ | | Eₐ |
| 601 | E₁ₐE₂EᵢᵢE_{iib}E₄ | AlkLEᵥEᵥᵢ | | Eₐ |
| 602 | E_{1b}E₂EᵢᵢE_{iib}E₄ | AlkLEᵥEᵥᵢ | | Eₐ |
| 603 | E₁ₐE₂E₃EᵢE₄ | AlkLEᵥEᵥᵢ | | Eₐ |
| 604 | E_{1b}E₂E₃EᵢE₄ | AlkLEᵥEᵥᵢ | | Eₐ |
| 605 | E₁ₐE₂E₃EᵢᵢE₄ | AlkLEᵥEᵥᵢ | | Eₐ |
| 606 | E_{1b}E₂E₃EᵢᵢE₄ | AlkLEᵥEᵥᵢ | | Eₐ |
| 607 | E₁ₐE₂E₃EᵢᵢE_{iib}E₄ | AlkLEᵥEᵥᵢ | | Eₐ |
| 608 | E_{1b}E₂E₃EᵢᵢE_{iib}E₄ | AlkLEᵥEᵥᵢ | | Eₐ |
| 609 | E₁ₐE₂Eᵢᵢᵢ | AlkLEᵥEᵥᵢ | | Eₐ |
| 610 | E_{1b}E₂Eᵢᵢᵢ | AlkLEᵥEᵥᵢ | | Eₐ |
| 611 | E₁ₐE₂E₃Eᵢᵢᵢ | AlkLEᵥEᵥᵢ | | Eₐ |
| 612 | E_{1b}E₂E₃Eᵢᵢᵢ | AlkLEᵥEᵥᵢ | | Eₐ |
| 613 | E₁ₐE₂EᵢᵢᵢE₄ | AlkLEᵥEᵥᵢ | | Eₐ |
| 614 | E_{1b}E₂EᵢᵢᵢE₄ | AlkLEᵥEᵥᵢ | | Eₐ |
| 615 | E₁ₐE₂E₃EᵢᵢᵢE₄ | AlkLEᵥEᵥᵢ | | Eₐ |
| 616 | E_{1b}E₂E₃EᵢᵢᵢE₄ | AlkLEᵥEᵥᵢ | | Eₐ |
| 617 | E₁ₐE₂Eᵢᵥ | AlkLEᵥEᵥᵢ | | Eₐ |
| 618 | E_{1b}E₂Eᵢᵥ | AlkLEᵥEᵥᵢ | | Eₐ |
| 619 | E₁ₐE₂E₃Eᵢᵥ | AlkLEᵥEᵥᵢ | | Eₐ |
| 620 | E_{1b}E₂E₃Eᵢᵥ | AlkLEᵥEᵥᵢ | | Eₐ |
| 621 | E₁ₐE₂EᵢᵥE₄ | AlkLEᵥEᵥᵢ | | Eₐ |
| 622 | E_{1b}E₂EᵢᵥE₄ | AlkLEᵥEᵥᵢ | | Eₐ |
| 623 | E₁ₐE₂E₃EᵢᵥE₄ | AlkLEᵥEᵥᵢ | | Eₐ |
| 624 | E_{1b}E₂E₃EᵢᵥE₄ | AlkLEᵥEᵥᵢ | | Eₐ |
| 625 | E₁ₐE₂ | AlkLEᵥEᵥᵢ | E₄* | Eₐ |
| 626 | E_{1b}E₂ | AlkLEᵥEᵥᵢ | E₄* | Eₐ |
| 627 | E₁ₐE₂E₃ | AlkLEᵥEᵥᵢ | E₄* | Eₐ |
| 628 | E_{1b}E₂E₃ | AlkLEᵥEᵥᵢ | E₄* | Eₐ |
| 629 | E₁ₐE₂Eᵢ | AlkLEᵥEᵥᵢ | E₄* | Eₐ |
| 630 | E_{1b}E₂Eᵢ | AlkLEᵥEᵥᵢ | E₄* | Eₐ |
| 631 | E₁ₐE₂Eᵢᵢ | AlkLEᵥEᵥᵢ | E₄* | Eₐ |
| 632 | E_{1b}E₂Eᵢᵢ | AlkLEᵥEᵥᵢ | E₄* | Eₐ |
| 633 | E₁ₐE₂EᵢᵢE_{iib} | AlkLEᵥEᵥᵢ | E₄* | Eₐ |
| 634 | E_{1b}E₂EᵢᵢE_{iib} | AlkLEᵥEᵥᵢ | E₄* | Eₐ |
| 635 | E₁ₐE₂E₃Eᵢ | AlkLEᵥEᵥᵢ | E₄* | Eₐ |
| 636 | E_{1b}E₂E₃Eᵢ | AlkLEᵥEᵥᵢ | E₄* | Eₐ |
| 637 | E₁ₐE₂E₃Eᵢᵢ | AlkLEᵥEᵥᵢ | E₄* | Eₐ |
| 638 | E_{1b}E₂E₃Eᵢᵢ | AlkLEᵥEᵥᵢ | E₄* | Eₐ |
| 639 | E₁ₐE₂E₃EᵢᵢE_{iib} | AlkLEᵥEᵥᵢ | E₄* | Eₐ |
| 640 | E_{1b}E₂E₃EᵢᵢE_{iib} | AlkLEᵥEᵥᵢ | E₄* | Eₐ |
| 641 | E₁ₐE₂E₄ | AlkLEᵥEᵥᵢ | E₄* | Eₐ |
| 642 | E_{1b}E₂E₄ | AlkLEᵥEᵥᵢ | E₄* | Eₐ |
| 643 | E₁ₐE₂E₃E₄ | AlkLEᵥEᵥᵢ | E₄* | Eₐ |
| 644 | E_{1b}E₂E₃E₄ | AlkLEᵥEᵥᵢ | E₄* | Eₐ |
| 645 | E₁ₐE₂EᵢE₄ | AlkLEᵥEᵥᵢ | E₄* | Eₐ |
| 646 | E_{1b}E₂EᵢE₄ | AlkLEᵥEᵥᵢ | E₄* | Eₐ |
| 647 | E₁ₐE₂EᵢᵢE₄ | AlkLEᵥEᵥᵢ | E₄* | Eₐ |
| 648 | E_{1b}E₂EᵢᵢE₄ | AlkLEᵥEᵥᵢ | E₄* | Eₐ |
| 649 | E₁ₐE₂EᵢᵢE_{iib}E₄ | AlkLEᵥEᵥᵢ | E₄* | Eₐ |
| 650 | E_{1b}E₂EᵢᵢE_{iib}E₄ | AlkLEᵥEᵥᵢ | E₄* | Eₐ |
| 651 | E₁ₐE₂E₃EᵢE₄ | AlkLEᵥEᵥᵢ | E₄* | Eₐ |
| 652 | E_{1b}E₂E₃EᵢE₄ | AlkLEᵥEᵥᵢ | E₄* | Eₐ |
| 653 | E₁ₐE₂E₃EᵢᵢE₄ | AlkLEᵥEᵥᵢ | E₄* | Eₐ |
| 654 | E_{1b}E₂E₃EᵢᵢE₄ | AlkLEᵥEᵥᵢ | E₄* | Eₐ |
| 655 | E₁ₐE₂E₃EᵢᵢE_{iib}E₄ | AlkLEᵥEᵥᵢ | E₄* | Eₐ |
| 656 | E_{1b}E₂E₃EᵢᵢE_{iib}E₄ | AlkLEᵥEᵥᵢ | E₄* | Eₐ |
| 657 | E₁ₐE₂Eᵢᵢᵢ | AlkLEᵥEᵥᵢ | E₄* | Eₐ |
| 658 | E_{1b}E₂Eᵢᵢᵢ | AlkLEᵥEᵥᵢ | E₄* | Eₐ |
| 659 | E₁ₐE₂E₃Eᵢᵢᵢ | AlkLEᵥEᵥᵢ | E₄* | Eₐ |
| 660 | E_{1b}E₂E₃Eᵢᵢᵢ | AlkLEᵥEᵥᵢ | E₄* | Eₐ |
| 661 | E₁ₐE₂EᵢᵢᵢE₄ | AlkLEᵥEᵥᵢ | E₄* | Eₐ |
| 662 | E_{1b}E₂EᵢᵢᵢE₄ | AlkLEᵥEᵥᵢ | E₄* | Eₐ |
| 663 | E₁ₐE₂E₃EᵢᵢᵢE₄ | AlkLEᵥEᵥᵢ | E₄* | Eₐ |
| 664 | E_{1b}E₂E₃EᵢᵢᵢE₄ | AlkLEᵥEᵥᵢ | E₄* | Eₐ |
| 665 | E₁ₐE₂Eᵢᵥ | AlkLEᵥEᵥᵢ | E₄* | Eₐ |
| 666 | E_{1b}E₂Eᵢᵥ | AlkLEᵥEᵥᵢ | E₄* | Eₐ |
| 667 | E₁ₐE₂E₃Eᵢᵥ | AlkLEᵥEᵥᵢ | E₄* | Eₐ |
| 668 | E_{1b}E₂E₃Eᵢᵥ | AlkLEᵥEᵥᵢ | E₄* | Eₐ |
| 669 | E₁ₐE₂EᵢᵥE₄ | AlkLEᵥEᵥᵢ | E₄* | Eₐ |
| 670 | E_{1b}E₂EᵢᵥE₄ | AlkLEᵥEᵥᵢ | E₄* | Eₐ |
| 671 | E₁ₐE₂E₃EᵢᵥE₄ | AlkLEᵥEᵥᵢ | E₄* | Eₐ |
| 672 | E_{1b}E₂E₃EᵢᵥE₄ | AlkLEᵥEᵥᵢ | E₄* | Eₐ |
| 673 | E₁ₐE₂ | AlkLEᵥEᵥᵢ | E₅ | Eₐ |
| 674 | E_{1b}E₂ | AlkLEᵥEᵥᵢ | E₅ | Eₐ |
| 675 | E₁ₐE₂E₃ | AlkLEᵥEᵥᵢ | E₅ | Eₐ |
| 676 | E_{1b}E₂E₃ | AlkLEᵥEᵥᵢ | E₅ | Eₐ |
| 677 | E₁ₐE₂Eᵢ | AlkLEᵥEᵥᵢ | E₅ | Eₐ |
| 678 | E_{1b}E₂Eᵢ | AlkLEᵥEᵥᵢ | E₅ | Eₐ |
| 679 | E₁ₐE₂Eᵢᵢ | AlkLEᵥEᵥᵢ | E₅ | Eₐ |
| 680 | E_{1b}E₂Eᵢᵢ | AlkLEᵥEᵥᵢ | E₅ | Eₐ |
| 681 | E₁ₐE₂EᵢᵢE_{iib} | AlkLEᵥEᵥᵢ | E₅ | Eₐ |
| 682 | E_{1b}E₂EᵢᵢE_{iib} | AlkLEᵥEᵥᵢ | E₅ | Eₐ |
| 683 | E₁ₐE₂E₃Eᵢ | AlkLEᵥEᵥᵢ | E₅ | Eₐ |
| 684 | E_{1b}E₂E₃Eᵢ | AlkLEᵥEᵥᵢ | E₅ | Eₐ |
| 685 | E₁ₐE₂E₃Eᵢᵢ | AlkLEᵥEᵥᵢ | E₅ | Eₐ |
| 686 | E_{1b}E₂E₃Eᵢᵢ | AlkLEᵥEᵥᵢ | E₅ | Eₐ |
| 687 | E₁ₐE₂E₃EᵢᵢE_{iib} | AlkLEᵥEᵥᵢ | E₅ | Eₐ |
| 688 | E_{1b}E₂E₃EᵢᵢE_{iib} | AlkLEᵥEᵥᵢ | E₅ | Eₐ |
| 689 | E₁ₐE₂E₄ | AlkLEᵥEᵥᵢ | E₅ | Eₐ |
| 690 | E_{1b}E₂E₄ | AlkLEᵥEᵥᵢ | E₅ | Eₐ |
| 691 | E₁ₐE₂E₃E₄ | AlkLEᵥEᵥᵢ | E₅ | Eₐ |
| 692 | E_{1b}E₂E₃E₄ | AlkLEᵥEᵥᵢ | E₅ | Eₐ |
| 693 | E₁ₐE₂EᵢE₄ | AlkLEᵥEᵥᵢ | E₅ | Eₐ |
| 694 | E_{1b}E₂EᵢE₄ | AlkLEᵥEᵥᵢ | E₅ | Eₐ |
| 695 | E₁ₐE₂EᵢᵢE₄ | AlkLEᵥEᵥᵢ | E₅ | Eₐ |
| 696 | E_{1b}E₂EᵢᵢE₄ | AlkLEᵥEᵥᵢ | E₅ | Eₐ |
| 697 | E₁ₐE₂EᵢᵢE_{iib}E₄ | AlkLEᵥEᵥᵢ | E₅ | Eₐ |
| 698 | E_{1b}E₂EᵢᵢE_{iib}E₄ | AlkLEᵥEᵥᵢ | E₅ | Eₐ |
| 699 | E₁ₐE₂E₃EᵢE₄ | AlkLEᵥEᵥᵢ | E₅ | Eₐ |
| 700 | E_{1b}E₂E₃EᵢE₄ | AlkLEᵥEᵥᵢ | E₅ | Eₐ |
| 701 | E₁ₐE₂E₃EᵢᵢE₄ | AlkLEᵥEᵥᵢ | E₅ | Eₐ |
| 702 | E_{1b}E₂E₃EᵢᵢE₄ | AlkLEᵥEᵥᵢ | E₅ | Eₐ |
| 703 | E₁ₐE₂E₃EᵢᵢE_{iib}E₄ | AlkLEᵥEᵥᵢ | E₅ | Eₐ |
| 704 | E_{1b}E₂E₃EᵢᵢE_{iib}E₄ | AlkLEᵥEᵥᵢ | E₅ | Eₐ |
| 705 | E₁ₐE₂Eᵢᵢᵢ | AlkLEᵥEᵥᵢ | E₅ | Eₐ |
| 706 | E_{1b}E₂Eᵢᵢᵢ | AlkLEᵥEᵥᵢ | E₅ | Eₐ |
| 707 | E₁ₐE₂E₃Eᵢᵢᵢ | AlkLEᵥEᵥᵢ | E₅ | Eₐ |
| 708 | E_{1b}E₂E₃Eᵢᵢᵢ | AlkLEᵥEᵥᵢ | E₅ | Eₐ |
| 709 | E₁ₐE₂EᵢᵢᵢE₄ | AlkLEᵥEᵥᵢ | E₅ | Eₐ |
| 710 | E_{1b}E₂EᵢᵢᵢE₄ | AlkLEᵥEᵥᵢ | E₅ | Eₐ |
| 711 | E₁ₐE₂E₃EᵢᵢᵢE₄ | AlkLEᵥEᵥᵢ | E₅ | Eₐ |
| 712 | E_{1b}E₂E₃EᵢᵢᵢE₄ | AlkLEᵥEᵥᵢ | E₅ | Eₐ |
| 713 | E₁ₐE₂Eᵢᵥ | AlkLEᵥEᵥᵢ | E₅ | Eₐ |
| 714 | E_{1b}E₂Eᵢᵥ | AlkLEᵥEᵥᵢ | E₅ | Eₐ |
| 715 | E₁ₐE₂E₃Eᵢᵥ | AlkLEᵥEᵥᵢ | E₅ | Eₐ |
| 716 | E_{1b}E₂E₃Eᵢᵥ | AlkLEᵥEᵥᵢ | E₅ | Eₐ |
| 717 | E₁ₐE₂EᵢᵥE₄ | AlkLEᵥEᵥᵢ | E₅ | Eₐ |
| 718 | E_{1b}E₂EᵢᵥE₄ | AlkLEᵥEᵥᵢ | E₅ | Eₐ |
| 719 | E₁ₐE₂E₃EᵢᵥE₄ | AlkLEᵥEᵥᵢ | E₅ | Eₐ |
| 720 | E_{1b}E₂E₃EᵢᵥE₄ | AlkLEᵥEᵥᵢ | E₅ | Eₐ |
| 721 | E₁ₐE₂ | AlkLEᵥEᵥᵢ | E₄*E₅ | Eₐ |
| 722 | E_{1b}E₂ | AlkLEᵥEᵥᵢ | E₄*E₅ | Eₐ |
| 723 | E₁ₐE₂E₃ | AlkLEᵥEᵥᵢ | E₄*E₅ | Eₐ |
| 724 | E_{1b}E₂E₃ | AlkLEᵥEᵥᵢ | E₄*E₅ | Eₐ |
| 725 | E₁ₐE₂Eᵢ | AlkLEᵥEᵥᵢ | E₄*E₅ | Eₐ |
| 726 | E_{1b}E₂Eᵢ | AlkLEᵥEᵥᵢ | E₄*E₅ | Eₐ |
| 727 | E₁ₐE₂Eᵢᵢ | AlkLEᵥEᵥᵢ | E₄*E₅ | Eₐ |
| 728 | E_{1b}E₂Eᵢᵢ | AlkLEᵥEᵥᵢ | E₄*E₅ | Eₐ |
| 729 | E₁ₐE₂EᵢᵢE_{iib} | AlkLEᵥEᵥᵢ | E₄*E₅ | Eₐ |
| 730 | E_{1b}E₂EᵢᵢE_{iib} | AlkLEᵥEᵥᵢ | E₄*E₅ | Eₐ |
| 731 | E₁ₐE₂E₃Eᵢ | AlkLEᵥEᵥᵢ | E₄*E₅ | Eₐ |
| 732 | E_{1b}E₂E₃Eᵢ | AlkLEᵥEᵥᵢ | E₄*E₅ | Eₐ |
| 733 | E₁ₐE₂E₃Eᵢᵢ | AlkLEᵥEᵥᵢ | E₄*E₅ | Eₐ |
| 734 | E_{1b}E₂E₃Eᵢᵢ | AlkLEᵥEᵥᵢ | E₄*E₅ | Eₐ |
| 735 | E₁ₐE₂E₃EᵢᵢE_{iib} | AlkLEᵥEᵥᵢ | E₄*E₅ | Eₐ |
| 736 | E_{1b}E₂E₃EᵢᵢE_{iib} | AlkLEᵥEᵥᵢ | E₄*E₅ | Eₐ |
| 737 | E₁ₐE₂E₄ | AlkLEᵥEᵥᵢ | E₄*E₅ | Eₐ |
| 738 | E_{1b}E₂E₄ | AlkLEᵥEᵥᵢ | E₄*E₅ | Eₐ |
| 739 | E₁ₐE₂E₃E₄ | AlkLEᵥEᵥᵢ | E₄*E₅ | Eₐ |
| 740 | E_{1b}E₂E₃E₄ | AlkLEᵥEᵥᵢ | E₄*E₅ | Eₐ |
| 741 | E₁ₐE₂EᵢE₄ | AlkLEᵥEᵥᵢ | E₄*E₅ | Eₐ |
| 742 | E_{1b}E₂EᵢE₄ | AlkLEᵥEᵥᵢ | E₄*E₅ | Eₐ |
| 743 | E₁ₐE₂EᵢᵢE₄ | AlkLEᵥEᵥᵢ | E₄*E₅ | Eₐ |
| 744 | E_{1b}E₂EᵢᵢE₄ | AlkLEᵥEᵥᵢ | E₄*E₅ | Eₐ |
| 745 | E₁ₐE₂EᵢᵢE_{iib}E₄ | AlkLEᵥEᵥᵢ | E₄*E₅ | Eₐ |
| 746 | E_{1b}E₂EᵢᵢE_{iib}E₄ | AlkLEᵥEᵥᵢ | E₄*E₅ | Eₐ |
| 747 | E₁ₐE₂E₃EᵢE₄ | AlkLEᵥEᵥᵢ | E₄*E₅ | Eₐ |
| 748 | E_{1b}E₂E₃EᵢE₄ | AlkLEᵥEᵥᵢ | E₄*E₅ | Eₐ |
| 749 | E₁ₐE₂E₃EᵢᵢE₄ | AlkLEᵥEᵥᵢ | E₄*E₅ | Eₐ |
| 750 | E_{1b}E₂E₃EᵢᵢE₄ | AlkLEᵥEᵥᵢ | E₄*E₅ | Eₐ |
| 751 | E₁ₐE₂E₃EᵢᵢE_{iib}E₄ | AlkLEᵥEᵥᵢ | E₄*E₅ | Eₐ |
| 752 | E_{1b}E₂E₃EᵢᵢE_{iib}E₄ | AlkLEᵥEᵥᵢ | E₄*E₅ | Eₐ |
| 753 | E₁ₐE₂Eᵢᵢᵢ | AlkLEᵥEᵥᵢ | E₄*E₅ | Eₐ |
| 754 | E_{1b}E₂Eᵢᵢᵢ | AlkLEᵥEᵥᵢ | E₄*E₅ | Eₐ |
| 755 | E₁ₐE₂E₃Eᵢᵢᵢ | AlkLEᵥEᵥᵢ | E₄*E₅ | Eₐ |
| 756 | E_{1b}E₂E₃Eᵢᵢᵢ | AlkLEᵥEᵥᵢ | E₄*E₅ | Eₐ |
| 757 | E₁ₐE₂EᵢᵢᵢE₄ | AlkLEᵥEᵥᵢ | E₄*E₅ | Eₐ |
| 758 | E_{1b}E₂EᵢᵢᵢE₄ | AlkLEᵥEᵥᵢ | E₄*E₅ | Eₐ |
| 759 | E₁ₐE₂E₃EᵢᵢᵢE₄ | AlkLEᵥEᵥᵢ | E₄*E₅ | Eₐ |
| 760 | E_{1b}E₂E₃EᵢᵢᵢE₄ | AlkLEᵥEᵥᵢ | E₄*E₅ | Eₐ |
| 761 | E₁ₐE₂Eᵢᵥ | AlkLEᵥEᵥᵢ | E₄*E₅ | Eₐ |
| 762 | E_{1b}E₂Eᵢᵥ | AlkLEᵥEᵥᵢ | E₄*E₅ | Eₐ |
| 763 | E₁ₐE₂E₃Eᵢᵥ | AlkLEᵥEᵥᵢ | E₄*E₅ | Eₐ |
| 764 | E_{1b}E₂E₃Eᵢᵥ | AlkLEᵥEᵥᵢ | E₄*E₅ | Eₐ |
| 765 | E₁ₐE₂EᵢᵥE₄ | AlkLEᵥEᵥᵢ | E₄*E₅ | Eₐ |
| 766 | E_{1b}E₂EᵢᵥE₄ | AlkLEᵥEᵥᵢ | E₄*E₅ | Eₐ |
| 767 | E₁ₐE₂E₃EᵢᵥE₄ | AlkLEᵥEᵥᵢ | E₄*E₅ | Eₐ |
| 768 | E_{1b}E₂E₃EᵢᵥE₄ | AlkLEᵥEᵥᵢ | E₄*E₅ | Eₐ |
| 769 | E₁ₐE₂ | EᵥEᵥᵢ | | E_{b} |
| 770 | E_{1b}E₂ | EᵥEᵥᵢ | | E_{b} |
| 771 | E₁ₐE₂E₃ | EᵥEᵥᵢ | | E_{b} |
| 772 | E_{1b}E₂E₃ | EᵥEᵥᵢ | | E_{b} |
| 773 | E₁ₐE₂Eᵢ | EᵥEᵥᵢ | | E_{b} |
| 774 | E_{1b}E₂Eᵢ | EᵥEᵥᵢ | | E_{b} |
| 775 | E₁ₐE₂Eᵢᵢ | EᵥEᵥᵢ | | E_{b} |
| 776 | E_{1b}E₂Eᵢᵢ | EᵥEᵥᵢ | | E_{b} |
| 777 | E₁ₐE₂EᵢᵢE_{iib} | EᵥEᵥᵢ | | E_{b} |
| 778 | E_{1b}E₂EᵢᵢE_{iib} | EᵥEᵥᵢ | | E_{b} |
| 779 | E₁ₐE₂E₃Eᵢ | EᵥEᵥᵢ | | E_{b} |
| 780 | E_{1b}E₂E₃Eᵢ | EᵥEᵥᵢ | | E_{b} |
| 781 | E₁ₐE₂E₃Eᵢᵢ | EᵥEᵥᵢ | | E_{b} |
| 782 | E_{1b}E₂E₃Eᵢᵢ | EᵥEᵥᵢ | | E_{b} |
| 783 | E₁ₐE₂E₃EᵢᵢE_{iib} | EᵥEᵥᵢ | | E_{b} |
| 784 | E_{1b}E₂E₃EᵢᵢE_{iib} | EᵥEᵥᵢ | | E_{b} |
| 785 | E₁ₐE₂E₄ | EᵥEᵥᵢ | | E_{b} |
| 786 | E_{1b}E₂E₄ | EᵥEᵥᵢ | | E_{b} |
| 787 | E₁ₐE₂E₃E₄ | EᵥEᵥᵢ | | E_{b} |
| 788 | E_{1b}E₂E₃E₄ | EᵥEᵥᵢ | | E_{b} |
| 789 | E₁ₐE₂EᵢE₄ | EᵥEᵥᵢ | | E_{b} |
| 790 | E_{1b}E₂EᵢE₄ | EᵥEᵥᵢ | | E_{b} |
| 791 | E₁ₐE₂EᵢᵢE₄ | EᵥEᵥᵢ | | E_{b} |
| 792 | E_{1b}E₂EᵢᵢE₄ | EᵥEᵥᵢ | | E_{b} |
| 793 | E₁ₐE₂EᵢᵢE_{iib}E₄ | EᵥEᵥᵢ | | E_{b} |
| 794 | E_{1b}E₂EᵢᵢE_{iib}E₄ | EᵥEᵥᵢ | | E_{b} |
| 795 | E₁ₐE₂E₃EᵢE₄ | EᵥEᵥᵢ | | E_{b} |
| 796 | E_{1b}E₂E₃EᵢE₄ | EᵥEᵥᵢ | | E_{b} |
| 797 | E₁ₐE₂E₃EᵢᵢE₄ | EᵥEᵥᵢ | | E_{b} |
| 798 | E_{1b}E₂E₃EᵢᵢE₄ | EᵥEᵥᵢ | | E_{b} |
| 799 | E₁ₐE₂E₃EᵢᵢE_{iib}E₄ | EᵥEᵥᵢ | | E_{b} |
| 800 | E_{1b}E₂E₃EᵢᵢE_{iib}E₄ | EᵥEᵥᵢ | | E_{b} |
| 801 | E₁ₐE₂Eᵢᵢᵢ | EᵥEᵥᵢ | | E_{b} |
| 802 | E_{1b}E₂Eᵢᵢᵢ | EᵥEᵥᵢ | | E_{b} |
| 803 | E₁ₐE₂E₃Eᵢᵢᵢ | EᵥEᵥᵢ | | E_{b} |
| 804 | E_{1b}E₂E₃Eᵢᵢᵢ | EᵥEᵥᵢ | | E_{b} |
| 805 | E₁ₐE₂EᵢᵢᵢE₄ | EᵥEᵥᵢ | | E_{b} |
| 806 | E_{1b}E₂EᵢᵢᵢE₄ | EᵥEᵥᵢ | | E_{b} |
| 807 | E₁ₐE₂E₃EᵢᵢᵢE₄ | EᵥEᵥᵢ | | E_{b} |
| 808 | E_{1b}E₂E₃EᵢᵢᵢE₄ | EᵥEᵥᵢ | | E_{b} |
| 809 | E₁ₐE₂Eᵢᵥ | EᵥEᵥᵢ | | E_{b} |
| 810 | E_{1b}E₂Eᵢᵥ | EᵥEᵥᵢ | | E_{b} |
| 811 | E₁ₐE₂E₃Eᵢᵥ | EᵥEᵥᵢ | | E_{b} |
| 812 | E_{1b}E₂E₃Eᵢᵥ | EᵥEᵥᵢ | | E_{b} |
| 813 | E₁ₐE₂EᵢᵥE₄ | EᵥEᵥᵢ | | E_{b} |
| 814 | E_{1b}E₂EᵢᵥE₄ | EᵥEᵥᵢ | | E_{b} |
| 815 | E₁ₐE₂E₃EᵢᵥE₄ | EᵥEᵥᵢ | | E_{b} |
| 816 | E_{1b}E₂E₃EᵢᵥE₄ | EᵥEᵥᵢ | | E_{b} |
| 817 | E₁ₐE₂ | EᵥEᵥᵢ | E₄* | E_{b} |
| 818 | E_{1b}E₂ | EᵥEᵥᵢ | E₄* | E_{b} |
| 819 | E₁ₐE₂E₃ | EᵥEᵥᵢ | E₄* | E_{b} |
| 820 | E_{1b}E₂E₃ | EᵥEᵥᵢ | E₄* | E_{b} |
| 821 | E₁ₐE₂Eᵢ | EᵥEᵥᵢ | E₄* | E_{b} |
| 822 | E_{1b}E₂Eᵢ | EᵥEᵥᵢ | E₄* | E_{b} |
| 823 | E₁ₐE₂Eᵢᵢ | EᵥEᵥᵢ | E₄* | E_{b} |
| 824 | E_{1b}E₂Eᵢᵢ | EᵥEᵥᵢ | E₄* | E_{b} |
| 825 | E₁ₐE₂EᵢᵢE_{iib} | EᵥEᵥᵢ | E₄* | E_{b} |
| 826 | E_{1b}E₂EᵢᵢE_{iib} | EᵥEᵥᵢ | E₄* | E_{b} |
| 827 | E₁ₐE₂E₃Eᵢ | EᵥEᵥᵢ | E₄* | E_{b} |
| 828 | E_{1b}E₂E₃Eᵢ | EᵥEᵥᵢ | E₄* | E_{b} |
| 829 | E₁ₐE₂E₃Eᵢᵢ | EᵥEᵥᵢ | E₄* | E_{b} |
| 830 | E_{1b}E₂E₃Eᵢᵢ | EᵥEᵥᵢ | E₄* | E_{b} |
| 831 | E₁ₐE₂E₃EᵢᵢE_{iib} | EᵥEᵥᵢ | E₄* | E_{b} |
| 832 | E_{1b}E₂E₃EᵢᵢE_{iib} | EᵥEᵥᵢ | E₄* | E_{b} |
| 833 | E₁ₐE₂E₄ | EᵥEᵥᵢ | E₄* | E_{b} |
| 834 | E_{1b}E₂E₄ | EᵥEᵥᵢ | E₄* | E_{b} |
| 835 | E₁ₐE₂E₃E₄ | EᵥEᵥᵢ | E₄* | E_{b} |
| 836 | E_{1b}E₂E₃E₄ | EᵥEᵥᵢ | E₄* | E_{b} |
| 837 | E₁ₐE₂EᵢE₄ | EᵥEᵥᵢ | E₄* | E_{b} |
| 838 | E_{1b}E₂EᵢE₄ | EᵥEᵥᵢ | E₄* | E_{b} |
| 839 | E₁ₐE₂EᵢᵢE₄ | EᵥEᵥᵢ | E₄* | E_{b} |
| 840 | E_{1b}E₂EᵢᵢE₄ | EᵥEᵥᵢ | E₄* | E_{b} |
| 841 | E₁ₐE₂EᵢᵢE_{iib}E₄ | EᵥEᵥᵢ | E₄* | E_{b} |
| 842 | E_{1b}E₂EᵢᵢE_{iib}E₄ | EᵥEᵥᵢ | E₄* | E_{b} |
| 843 | E₁ₐE₂E₃EᵢE₄ | EᵥEᵥᵢ | E₄* | E_{b} |
| 844 | E_{1b}E₂E₃EᵢE₄ | EᵥEᵥᵢ | E₄* | E_{b} |
| 845 | E₁ₐE₂E₃EᵢᵢE₄ | EᵥEᵥᵢ | E₄* | E_{b} |
| 846 | E_{1b}E₂E₃EᵢᵢE₄ | EᵥEᵥᵢ | E₄* | E_{b} |
| 847 | E₁ₐE₂E₃EᵢᵢE_{iib}E₄ | EᵥEᵥᵢ | E₄* | E_{b} |
| 848 | E_{1b}E₂E₃EᵢᵢE_{iib}E₄ | EᵥEᵥᵢ | E₄* | E_{b} |
| 849 | E₁ₐE₂Eᵢᵢᵢ | EᵥEᵥᵢ | E₄* | E_{b} |
| 850 | E_{1b}E₂Eᵢᵢᵢ | EᵥEᵥᵢ | E₄* | E_{b} |
| 851 | E₁ₐE₂E₃Eᵢᵢᵢ | EᵥEᵥᵢ | E₄* | E_{b} |
| 852 | E_{1b}E₂E₃Eᵢᵢᵢ | EᵥEᵥᵢ | E₄* | E_{b} |
| 853 | E₁ₐE₂EᵢᵢᵢE₄ | EᵥEᵥᵢ | E₄* | E_{b} |
| 854 | E_{1b}E₂EᵢᵢᵢE₄ | EᵥEᵥᵢ | E₄* | E_{b} |
| 855 | E₁ₐE₂E₃EᵢᵢᵢE₄ | EᵥEᵥᵢ | E₄* | E_{b} |
| 856 | E_{1b}E₂E₃EᵢᵢᵢE₄ | EᵥEᵥᵢ | E₄* | E_{b} |
| 857 | E₁ₐE₂Eᵢᵥ | EᵥEᵥᵢ | E₄* | E_{b} |
| 858 | E_{1b}E₂Eᵢᵥ | EᵥEᵥᵢ | E₄* | E_{b} |
| 859 | E₁ₐE₂E₃Eᵢᵥ | EᵥEᵥᵢ | E₄* | E_{b} |
| 860 | E_{1b}E₂E₃Eᵢᵥ | EᵥEᵥᵢ | E₄* | E_{b} |
| 861 | E₁ₐE₂EᵢᵥE₄ | EᵥEᵥᵢ | E₄* | E_{b} |
| 862 | E_{1b}E₂EᵢᵥE₄ | EᵥEᵥᵢ | E₄* | E_{b} |
| 863 | E₁ₐE₂E₃EᵢᵥE₄ | EᵥEᵥᵢ | E₄* | E_{b} |
| 864 | E_{1b}E₂E₃EᵢᵥE₄ | EᵥEᵥᵢ | E₄* | E_{b} |
| 865 | E₁ₐE₂ | EᵥEᵥᵢ | E₅ | E_{b} |
| 866 | E_{1b}E₂ | EᵥEᵥᵢ | E₅ | E_{b} |
| 867 | E₁ₐE₂E₃ | EᵥEᵥᵢ | E₅ | E_{b} |
| 868 | E_{1b}E₂E₃ | EᵥEᵥᵢ | E₅ | E_{b} |
| 869 | E₁ₐE₂Eᵢ | EᵥEᵥᵢ | E₅ | E_{b} |
| 870 | E_{1b}E₂Eᵢ | EᵥEᵥᵢ | E₅ | E_{b} |
| 871 | E₁ₐE₂Eᵢᵢ | EᵥEᵥᵢ | E₅ | E_{b} |
| 872 | E_{1b}E₂Eᵢᵢ | EᵥEᵥᵢ | E₅ | E_{b} |
| 873 | E₁ₐE₂EᵢᵢE_{iib} | EᵥEᵥᵢ | E₅ | E_{b} |
| 874 | E_{1b}E₂EᵢᵢE_{iib} | EᵥEᵥᵢ | E₅ | E_{b} |
| 875 | E₁ₐE₂E₃Eᵢ | EᵥEᵥᵢ | E₅ | E_{b} |
| 876 | E_{1b}E₂E₃Eᵢ | EᵥEᵥᵢ | E₅ | E_{b} |
| 877 | E₁ₐE₂E₃Eᵢᵢ | EᵥEᵥᵢ | E₅ | E_{b} |
| 878 | E_{1b}E₂E₃Eᵢᵢ | EᵥEᵥᵢ | E₅ | E_{b} |
| 879 | E₁ₐE₂E₃EᵢᵢE_{iib} | EᵥEᵥᵢ | E₅ | E_{b} |
| 880 | E_{1b}E₂E₃EᵢᵢE_{iib} | EᵥEᵥᵢ | E₅ | E_{b} |
| 881 | E₁ₐE₂E₄ | EᵥEᵥᵢ | E₅ | E_{b} |
| 882 | E_{1b}E₂E₄ | EᵥEᵥᵢ | E₅ | E_{b} |
| 883 | E₁ₐE₂E₃E₄ | EᵥEᵥᵢ | E₅ | E_{b} |
| 884 | E_{1b}E₂E₃E₄ | EᵥEᵥᵢ | E₅ | E_{b} |
| 885 | E₁ₐE₂EᵢE₄ | EᵥEᵥᵢ | E₅ | E_{b} |
| 886 | E_{1b}E₂EᵢE₄ | EᵥEᵥᵢ | E₅ | E_{b} |
| 887 | E₁ₐE₂EᵢᵢE₄ | EᵥEᵥᵢ | E₅ | E_{b} |
| 888 | E_{1b}E₂EᵢᵢE₄ | EᵥEᵥᵢ | E₅ | E_{b} |
| 889 | E₁ₐE₂EᵢᵢE_{iib}E₄ | EᵥEᵥᵢ | E₅ | E_{b} |
| 890 | E_{1b}E₂EᵢᵢE_{iib}E₄ | EᵥEᵥᵢ | E₅ | E_{b} |
| 891 | E₁ₐE₂E₃EᵢE₄ | EᵥEᵥᵢ | E₅ | E_{b} |
| 892 | E_{1b}E₂E₃EᵢE₄ | EᵥEᵥᵢ | E₅ | E_{b} |
| 893 | E₁ₐE₂E₃EᵢᵢE₄ | EᵥEᵥᵢ | E₅ | E_{b} |
| 894 | E_{1b}E₂E₃EᵢᵢE₄ | EᵥEᵥᵢ | E₅ | E_{b} |
| 895 | E₁ₐE₂E₃EᵢᵢE_{iib}E₄ | EᵥEᵥᵢ | E₅ | E_{b} |
| 896 | E_{1b}E₂E₃EᵢᵢE_{iib}E₄ | EᵥEᵥᵢ | E₅ | E_{b} |
| 897 | E₁ₐE₂Eᵢᵢᵢ | EᵥEᵥᵢ | E₅ | E_{b} |
| 898 | E_{1b}E₂Eᵢᵢᵢ | EᵥEᵥᵢ | E₅ | E_{b} |
| 899 | E₁ₐE₂E₃Eᵢᵢᵢ | EᵥEᵥᵢ | E₅ | E_{b} |
| 900 | E_{1b}E₂E₃Eᵢᵢᵢ | EᵥEᵥᵢ | E₅ | E_{b} |
| 901 | E₁ₐE₂EᵢᵢᵢE₄ | EᵥEᵥᵢ | E₅ | E_{b} |
| 902 | E_{1b}E₂EᵢᵢᵢE₄ | EᵥEᵥᵢ | E₅ | E_{b} |
| 903 | E₁ₐE₂E₃EᵢᵢᵢE₄ | EᵥEᵥᵢ | E₅ | E_{b} |
| 904 | E_{1b}E₂E₃EᵢᵢᵢE₄ | EᵥEᵥᵢ | E₅ | E_{b} |
| 905 | E₁ₐE₂Eᵢᵥ | EᵥEᵥᵢ | E₅ | E_{b} |
| 906 | E_{1b}E₂Eᵢᵥ | EᵥEᵥᵢ | E₅ | E_{b} |
| 907 | E₁ₐE₂E₃Eᵢᵥ | EᵥEᵥᵢ | E₅ | E_{b} |
| 908 | E_{1b}E₂E₃Eᵢᵥ | EᵥEᵥᵢ | E₅ | E_{b} |
| 909 | E₁ₐE₂EᵢᵥE₄ | EᵥEᵥᵢ | E₅ | E_{b} |
| 910 | E_{1b}E₂EᵢᵥE₄ | EᵥEᵥᵢ | E₅ | E_{b} |
| 911 | E₁ₐE₂E₃EᵢᵥE₄ | EᵥEᵥᵢ | E₅ | E_{b} |
| 912 | E_{1b}E₂E₃EᵢᵥE₄ | EᵥEᵥᵢ | E₅ | E_{b} |
| 913 | E₁ₐE₂ | EᵥEᵥᵢ | E₄*E₅ | E_{b} |
| 914 | E_{1b}E₂ | EᵥEᵥᵢ | E₄*E₅ | E_{b} |
| 915 | E₁ₐE₂E₃ | EᵥEᵥᵢ | E₄*E₅ | E_{b} |
| 916 | E_{1b}E₂E₃ | EᵥEᵥᵢ | E₄*E₅ | E_{b} |
| 917 | E₁ₐE₂Eᵢ | EᵥEᵥᵢ | E₄*E₅ | E_{b} |
| 918 | E_{1b}E₂Eᵢ | EᵥEᵥᵢ | E₄*E₅ | E_{b} |
| 919 | E₁ₐE₂Eᵢᵢ | EᵥEᵥᵢ | E₄*E₅ | E_{b} |
| 920 | E_{1b}E₂Eᵢᵢ | EᵥEᵥᵢ | E₄*E₅ | E_{b} |
| 921 | E₁ₐE₂EᵢᵢE_{iib} | EᵥEᵥᵢ | E₄*E₅ | E_{b} |
| 922 | E_{1b}E₂EᵢᵢE_{iib} | EᵥEᵥᵢ | E₄*E₅ | E_{b} |
| 923 | E₁ₐE₂E₃Eᵢ | EᵥEᵥᵢ | E₄*E₅ | E_{b} |
| 924 | E_{1b}E₂E₃Eᵢ | EᵥEᵥᵢ | E₄*E₅ | E_{b} |
| 925 | E₁ₐE₂E₃Eᵢᵢ | EᵥEᵥᵢ | E₄*E₅ | E_{b} |
| 926 | E_{1b}E₂E₃Eᵢᵢ | EᵥEᵥᵢ | E₄*E₅ | E_{b} |
| 927 | E₁ₐE₂E₃EᵢᵢE_{iib} | EᵥEᵥᵢ | E₄*E₅ | E_{b} |
| 928 | E_{1b}E₂E₃EᵢᵢE_{iib} | EᵥEᵥᵢ | E₄*E₅ | E_{b} |
| 929 | E₁ₐE₂E₄ | EᵥEᵥᵢ | E₄*E₅ | E_{b} |
| 930 | E_{1b}E₂E₄ | EᵥEᵥᵢ | E₄*E₅ | E_{b} |
| 931 | E₁ₐE₂E₃E₄ | EᵥEᵥᵢ | E₄*E₅ | E_{b} |
| 932 | E_{1b}E₂E₃E₄ | EᵥEᵥᵢ | E₄*E₅ | E_{b} |
| 933 | E₁ₐE₂EᵢE₄ | EᵥEᵥᵢ | E₄*E₅ | E_{b} |
| 934 | E_{1b}E₂EᵢE₄ | EᵥEᵥᵢ | E₄*E₅ | E_{b} |
| 935 | E₁ₐE₂EᵢᵢE₄ | EᵥEᵥᵢ | E₄*E₅ | E_{b} |
| 936 | E_{1b}E₂EᵢᵢE₄ | EᵥEᵥᵢ | E₄*E₅ | E_{b} |
| 937 | E₁ₐE₂EᵢᵢE_{iib}E₄ | EᵥEᵥᵢ | E₄*E₅ | E_{b} |
| 938 | E_{1b}E₂EᵢᵢE_{iib}E₄ | EᵥEᵥᵢ | E₄*E₅ | E_{b} |
| 939 | E₁ₐE₂E₃EᵢE₄ | EᵥEᵥᵢ | E₄*E₅ | E_{b} |
| 940 | E_{1b}E₂E₃EᵢE₄ | EᵥEᵥᵢ | E₄*E₅ | E_{b} |
| 941 | E₁ₐE₂E₃EᵢᵢE₄ | EᵥEᵥᵢ | E₄*E₅ | E_{b} |
| 942 | E_{1b}E₂E₃EᵢᵢE₄ | EᵥEᵥᵢ | E₄*E₅ | E_{b} |
| 943 | E₁ₐE₂E₃EᵢᵢE_{iib}E₄ | EᵥEᵥᵢ | E₄*E₅ | E_{b} |
| 944 | E_{1b}E₂E₃EᵢᵢE_{iib}E₄ | EᵥEᵥᵢ | E₄*E₅ | E_{b} |
| 945 | E₁ₐE₂Eᵢᵢᵢ | EᵥEᵥᵢ | E₄*E₅ | E_{b} |
| 946 | E_{1b}E₂Eᵢᵢᵢ | EᵥEᵥᵢ | E₄*E₅ | E_{b} |
| 947 | E₁ₐE₂E₃Eᵢᵢᵢ | EᵥEᵥᵢ | E₄*E₅ | E_{b} |
| 948 | E_{1b}E₂E₃Eᵢᵢᵢ | EᵥEᵥᵢ | E₄*E₅ | E_{b} |
| 949 | E₁ₐE₂EᵢᵢᵢE₄ | EᵥEᵥᵢ | E₄*E₅ | E_{b} |
| 950 | E_{1b}E₂EᵢᵢᵢE₄ | EᵥEᵥᵢ | E₄*E₅ | E_{b} |
| 951 | E₁ₐE₂E₃EᵢᵢᵢE₄ | EᵥEᵥᵢ | E₄*E₅ | E_{b} |
| 952 | E_{1b}E₂E₃EᵢᵢᵢE₄ | EᵥEᵥᵢ | E₄*E₅ | E_{b} |
| 953 | E₁ₐE₂Eᵢᵥ | EᵥEᵥᵢ | E₄*E₅ | E_{b} |
| 954 | E_{1b}E₂Eᵢᵥ | EᵥEᵥᵢ | E₄*E₅ | E_{b} |
| 955 | E₁ₐE₂E₃Eᵢᵥ | EᵥEᵥᵢ | E₄*E₅ | E_{b} |
| 956 | E_{1b}E₂E₃Eᵢᵥ | EᵥEᵥᵢ | E₄*E₅ | E_{b} |
| 957 | E₁ₐE₂EᵢᵥE₄ | EᵥEᵥᵢ | E₄*E₅ | E_{b} |
| 958 | E_{1b}E₂EᵢᵥE₄ | EᵥEᵥᵢ | E₄*E₅ | E_{b} |
| 959 | E₁ₐE₂E₃EᵢᵥE₄ | EᵥEᵥᵢ | E₄*E₅ | E_{b} |
| 960 | E_{1b}E₂E₃EᵢᵥE₄ | EᵥEᵥᵢ | E₄*E₅ | E_{b} |
| 961 | E₁ₐE₂ | AlkLEᵥEᵥᵢ | | E_{b} |
| 962 | E_{1b}E₂ | AlkLEᵥEᵥᵢ | | E_{b} |
| 963 | E₁ₐE₂E₃ | AlkLEᵥEᵥᵢ | | E_{b} |
| 964 | E_{1b}E₂E₃ | AlkLEᵥEᵥᵢ | | E_{b} |
| 965 | E₁ₐE₂Eᵢ | AlkLEᵥEᵥᵢ | | E_{b} |
| 966 | E_{1b}E₂Eᵢ | AlkLEᵥEᵥᵢ | | E_{b} |
| 967 | E₁ₐE₂Eᵢᵢ | AlkLEᵥEᵥᵢ | | E_{b} |
| 968 | E_{1b}E₂Eᵢᵢ | AlkLEᵥEᵥᵢ | | E_{b} |
| 969 | E₁ₐE₂EᵢᵢE_{iib} | AlkLEᵥEᵥᵢ | | E_{b} |
| 970 | E_{1b}E₂EᵢᵢE_{iib} | AlkLEᵥEᵥᵢ | | E_{b} |
| 971 | E₁ₐE₂E₃Eᵢ | AlkLEᵥEᵥᵢ | | E_{b} |
| 972 | E_{1b}E₂E₃Eᵢ | AlkLEᵥEᵥᵢ | | E_{b} |
| 973 | E₁ₐE₂E₃Eᵢᵢ | AlkLEᵥEᵥᵢ | | E_{b} |
| 974 | E_{1b}E₂E₃Eᵢᵢ | AlkLEᵥEᵥᵢ | | E_{b} |
| 975 | E₁ₐE₂E₃EᵢᵢE_{iib} | AlkLEᵥEᵥᵢ | | E_{b} |
| 976 | E_{1b}E₂E₃EᵢᵢE_{iib} | AlkLEᵥEᵥᵢ | | E_{b} |
| 977 | E₁ₐE₂E₄ | AlkLEᵥEᵥᵢ | | E_{b} |
| 978 | E_{1b}E₂E₄ | AlkLEᵥEᵥᵢ | | E_{b} |
| 979 | E₁ₐE₂E₃E₄ | AlkLEᵥEᵥᵢ | | E_{b} |
| 980 | E_{1b}E₂E₃E₄ | AlkLEᵥEᵥᵢ | | E_{b} |
| 981 | E₁ₐE₂EᵢE₄ | AlkLEᵥEᵥᵢ | | E_{b} |
| 982 | E_{1b}E₂EᵢE₄ | AlkLEᵥEᵥᵢ | | E_{b} |
| 983 | E₁ₐE₂EᵢᵢE₄ | AlkLEᵥEᵥᵢ | | E_{b} |
| 984 | E_{1b}E₂EᵢᵢE₄ | AlkLEᵥEᵥᵢ | | E_{b} |
| 985 | E₁ₐE₂EᵢᵢE_{iib}E₄ | AlkLEᵥEᵥᵢ | | E_{b} |
| 986 | E_{1b}E₂EᵢᵢE_{iib}E₄ | AlkLEᵥEᵥᵢ | | E_{b} |
| 987 | E₁ₐE₂E₃EᵢE₄ | AlkLEᵥEᵥᵢ | | E_{b} |
| 988 | E_{1b}E₂E₃EᵢE₄ | AlkLEᵥEᵥᵢ | | E_{b} |
| 989 | E₁ₐE₂E₃EᵢᵢE₄ | AlkLEᵥEᵥᵢ | | E_{b} |
| 990 | E_{1b}E₂E₃EᵢᵢE₄ | AlkLEᵥEᵥᵢ | | E_{b} |
| 991 | E₁ₐE₂E₃EᵢᵢE_{iib}E₄ | AlkLEᵥEᵥᵢ | | E_{b} |
| 992 | E_{1b}E₂E₃EᵢᵢE_{iib}E₄ | AlkLEᵥEᵥᵢ | | E_{b} |
| 993 | E₁ₐE₂Eᵢᵢᵢ | AlkLEᵥEᵥᵢ | | E_{b} |
| 994 | E_{1b}E₂Eᵢᵢᵢ | AlkLEᵥEᵥᵢ | | E_{b} |
| 995 | E₁ₐE₂E₃Eᵢᵢᵢ | AlkLEᵥEᵥᵢ | | E_{b} |
| 996 | E_{1b}E₂E₃Eᵢᵢᵢ | AlkLEᵥEᵥᵢ | | E_{b} |
| 997 | E₁ₐE₂EᵢᵢᵢE₄ | AlkLEᵥEᵥᵢ | | E_{b} |
| 998 | E_{1b}E₂EᵢᵢᵢE₄ | AlkLEᵥEᵥᵢ | | E_{b} |
| 999 | E₁ₐE₂E₃EᵢᵢᵢE₄ | AlkLEᵥEᵥᵢ | | E_{b} |
| 1000 | E_{1b}E₂E₃EᵢᵢᵢE₄ | AlkLEᵥEᵥᵢ | | E_{b} |
| 1001 | E₁ₐE₂Eᵢᵥ | AlkLEᵥEᵥᵢ | | E_{b} |
| 1002 | E_{1b}E₂Eᵢᵥ | AlkLEᵥEᵥᵢ | | E_{b} |
| 1003 | E₁ₐE₂E₃Eᵢᵥ | AlkLEᵥEᵥᵢ | | E_{b} |
| 1004 | E_{1b}E₂E₃Eᵢᵥ | AlkLEᵥEᵥᵢ | | E_{b} |
| 1005 | E₁ₐE₂EᵢᵥE₄ | AlkLEᵥEᵥᵢ | | E_{b} |
| 1006 | E_{1b}E₂EᵢᵥE₄ | AlkLEᵥEᵥᵢ | | E_{b} |
| 1007 | E₁ₐE₂E₃EᵢᵥE₄ | AlkLEᵥEᵥᵢ | | E_{b} |
| 1008 | E_{1b}E₂E₃EᵢᵥE₄ | AlkLEᵥEᵥᵢ | | E_{b} |
| 1009 | E₁ₐE₂ | AlkLEᵥEᵥᵢ | E₄* | E_{b} |
| 1010 | E_{1b}E₂ | AlkLEᵥEᵥᵢ | E₄* | E_{b} |
| 1011 | E₁ₐE₂E₃ | AlkLEᵥEᵥᵢ | E₄* | E_{b} |
| 1012 | E_{1b}E₂E₃ | AlkLEᵥEᵥᵢ | E₄* | E_{b} |
| 1013 | E₁ₐE₂Eᵢ | AlkLEᵥEᵥᵢ | E₄* | E_{b} |
| 1014 | E_{1b}E₂Eᵢ | AlkLEᵥEᵥᵢ | E₄* | E_{b} |
| 1015 | E₁ₐE₂Eᵢᵢ | AlkLEᵥEᵥᵢ | E₄* | E_{b} |
| 1016 | E_{1b}E₂Eᵢᵢ | AlkLEᵥEᵥᵢ | E₄* | E_{b} |
| 1017 | E₁ₐE₂EᵢᵢE_{iib} | AlkLEᵥEᵥᵢ | E₄* | E_{b} |
| 1018 | E_{1b}E₂EᵢᵢE_{iib} | AlkLEᵥEᵥᵢ | E₄* | E_{b} |
| 1019 | E₁ₐE₂E₃Eᵢ | AlkLEᵥEᵥᵢ | E₄* | E_{b} |
| 1020 | E_{1b}E₂E₃Eᵢ | AlkLEᵥEᵥᵢ | E₄* | E_{b} |
| 1021 | E₁ₐE₂E₃Eᵢᵢ | AlkLEᵥEᵥᵢ | E₄* | E_{b} |
| 1022 | E_{1b}E₂E₃Eᵢᵢ | AlkLEᵥEᵥᵢ | E₄* | E_{b} |
| 1023 | E₁ₐE₂E₃EᵢᵢE_{iib} | AlkLEᵥEᵥᵢ | E₄* | E_{b} |
| 1024 | E_{1b}E₂E₃EᵢᵢE_{iib} | AlkLEᵥEᵥᵢ | E₄* | E_{b} |
| 1025 | E₁ₐE₂E₄ | AlkLEᵥEᵥᵢ | E₄* | E_{b} |
| 1026 | E_{1b}E₂E₄ | AlkLEᵥEᵥᵢ | E₄* | E_{b} |
| 1027 | E₁ₐE₂E₃E₄ | AlkLEᵥEᵥᵢ | E₄* | E_{b} |
| 1028 | E_{1b}E₂E₃E₄ | AlkLEᵥEᵥᵢ | E₄* | E_{b} |
| 1029 | E₁ₐE₂EᵢE₄ | AlkLEᵥEᵥᵢ | E₄* | E_{b} |
| 1030 | E_{1b}E₂EᵢE₄ | AlkLEᵥEᵥᵢ | E₄* | E_{b} |
| 1031 | E₁ₐE₂EᵢᵢE₄ | AlkLEᵥEᵥᵢ | E₄* | E_{b} |
| 1032 | E_{1b}E₂EᵢᵢE₄ | AlkLEᵥEᵥᵢ | E₄* | E_{b} |
| 1033 | E₁ₐE₂EᵢᵢE_{iib}E₄ | AlkLEᵥEᵥᵢ | E₄* | E_{b} |
| 1034 | E_{1b}E₂EᵢᵢE_{iib}E₄ | AlkLEᵥEᵥᵢ | E₄* | E_{b} |
| 1035 | E₁ₐE₂E₃EᵢE₄ | AlkLEᵥEᵥᵢ | E₄* | E_{b} |
| 1036 | E_{1b}E₂E₃EᵢE₄ | AlkLEᵥEᵥᵢ | E₄* | E_{b} |
| 1037 | E₁ₐE₂E₃EᵢᵢE₄ | AlkLEᵥEᵥᵢ | E₄* | E_{b} |
| 1038 | E_{1b}E₂E₃EᵢᵢE₄ | AlkLEᵥEᵥᵢ | E₄* | E_{b} |
| 1039 | E₁ₐE₂E₃EᵢᵢE_{iib}E₄ | AlkLEᵥEᵥᵢ | E₄* | E_{b} |
| 1040 | E_{1b}E₂E₃EᵢᵢE_{iib}E₄ | AlkLEᵥEᵥᵢ | E₄* | E_{b} |
| 1041 | E₁ₐE₂Eᵢᵢᵢ | AlkLEᵥEᵥᵢ | E₄* | E_{b} |
| 1042 | E_{1b}E₂Eᵢᵢᵢ | AlkLEᵥEᵥᵢ | E₄* | E_{b} |
| 1043 | E₁ₐE₂E₃Eᵢᵢᵢ | AlkLEᵥEᵥᵢ | E₄* | E_{b} |
| 1044 | E_{1b}E₂E₃Eᵢᵢᵢ | AlkLEᵥEᵥᵢ | E₄* | E_{b} |
| 1045 | E₁ₐE₂EᵢᵢᵢE₄ | AlkLEᵥEᵥᵢ | E₄* | E_{b} |
| 1046 | E_{1b}E₂EᵢᵢᵢE₄ | AlkLEᵥEᵥᵢ | E₄* | E_{b} |
| 1047 | E₁ₐE₂E₃EᵢᵢᵢE₄ | AlkLEᵥEᵥᵢ | E₄* | E_{b} |
| 1048 | E_{1b}E₂E₃EᵢᵢᵢE₄ | AlkLEᵥEᵥᵢ | E₄* | E_{b} |
| 1049 | E₁ₐE₂Eᵢᵥ | AlkLEᵥEᵥᵢ | E₄* | E_{b} |
| 1050 | E_{1b}E₂Eᵢᵥ | AlkLEᵥEᵥᵢ | E₄* | E_{b} |
| 1051 | E₁ₐE₂E₃Eᵢᵥ | AlkLEᵥEᵥᵢ | E₄* | E_{b} |
| 1052 | E_{1b}E₂E₃Eᵢᵥ | AlkLEᵥEᵥᵢ | E₄* | E_{b} |
| 1053 | E₁ₐE₂EᵢᵥE₄ | AlkLEᵥEᵥᵢ | E₄* | E_{b} |
| 1054 | E_{1b}E₂EᵢᵥE₄ | AlkLEᵥEᵥᵢ | E₄* | E_{b} |
| 1055 | E₁ₐE₂E₃EᵢᵥE₄ | AlkLEᵥEᵥᵢ | E₄* | E_{b} |
| 1056 | E_{1b}E₂E₃EᵢᵥE₄ | AlkLEᵥEᵥᵢ | E₄* | E_{b} |
| 1057 | E₁ₐE₂ | AlkLEᵥEᵥᵢ | E₅ | E_{b} |
| 1058 | E_{1b}E₂ | AlkLEᵥEᵥᵢ | E₅ | E_{b} |
| 1059 | E₁ₐE₂E₃ | AlkLEᵥEᵥᵢ | E₅ | E_{b} |
| 1060 | E_{1b}E₂E₃ | AlkLEᵥEᵥᵢ | E₅ | E_{b} |
| 1061 | E₁ₐE₂Eᵢ | AlkLEᵥEᵥᵢ | E₅ | E_{b} |
| 1062 | E_{1b}E₂Eᵢ | AlkLEᵥEᵥᵢ | E₅ | E_{b} |
| 1063 | E₁ₐE₂Eᵢᵢ | AlkLEᵥEᵥᵢ | E₅ | E_{b} |
| 1064 | E_{1b}E₂Eᵢᵢ | AlkLEᵥEᵥᵢ | E₅ | E_{b} |
| 1065 | E₁ₐE₂EᵢᵢE_{iib} | AlkLEᵥEᵥᵢ | E₅ | E_{b} |
| 1066 | E_{1b}E₂EᵢᵢE_{iib} | AlkLEᵥEᵥᵢ | E₅ | E_{b} |
| 1067 | E₁ₐE₂E₃Eᵢ | AlkLEᵥEᵥᵢ | E₅ | E_{b} |
| 1068 | E_{1b}E₂E₃Eᵢ | AlkLEᵥEᵥᵢ | E₅ | E_{b} |
| 1069 | E₁ₐE₂E₃Eᵢᵢ | AlkLEᵥEᵥᵢ | E₅ | E_{b} |
| 1070 | E_{1b}E₂E₃Eᵢᵢ | AlkLEᵥEᵥᵢ | E₅ | E_{b} |
| 1071 | E₁ₐE₂E₃EᵢᵢE_{iib} | AlkLEᵥEᵥᵢ | E₅ | E_{b} |
| 1072 | E_{1b}E₂E₃EᵢᵢE_{iib} | AlkLEᵥEᵥᵢ | E₅ | E_{b} |
| 1073 | E₁ₐE₂E₄ | AlkLEᵥEᵥᵢ | E₅ | E_{b} |
| 1074 | E_{1b}E₂E₄ | AlkLEᵥEᵥᵢ | E₅ | E_{b} |
| 1075 | E₁ₐE₂E₃E₄ | AlkLEᵥEᵥᵢ | E₅ | E_{b} |
| 1076 | E_{1b}E₂E₃E₄ | AlkLEᵥEᵥᵢ | E₅ | E_{b} |
| 1077 | E₁ₐE₂EᵢE₄ | AlkLEᵥEᵥᵢ | E₅ | E_{b} |
| 1078 | E_{1b}E₂EᵢE₄ | AlkLEᵥEᵥᵢ | E₅ | E_{b} |
| 1079 | E₁ₐE₂EᵢᵢE₄ | AlkLEᵥEᵥᵢ | E₅ | E_{b} |
| 1080 | E_{1b}E₂EᵢᵢE₄ | AlkLEᵥEᵥᵢ | E₅ | E_{b} |
| 1081 | E₁ₐE₂EᵢᵢE_{iib}E₄ | AlkLEᵥEᵥᵢ | E₅ | E_{b} |
| 1082 | E_{1b}E₂EᵢᵢE_{iib}E₄ | AlkLEᵥEᵥᵢ | E₅ | E_{b} |
| 1083 | E₁ₐE₂E₃EᵢE₄ | AlkLEᵥEᵥᵢ | E₅ | E_{b} |
| 1084 | E_{1b}E₂E₃EᵢE₄ | AlkLEᵥEᵥᵢ | E₅ | E_{b} |
| 1085 | E₁ₐE₂E₃EᵢᵢE₄ | AlkLEᵥEᵥᵢ | E₅ | E_{b} |
| 1086 | E_{1b}E₂E₃EᵢᵢE₄ | AlkLEᵥEᵥᵢ | E₅ | E_{b} |
| 1087 | E₁ₐE₂E₃EᵢᵢE_{iib}E₄ | AlkLEᵥEᵥᵢ | E₅ | E_{b} |
| 1088 | E_{1b}E₂E₃EᵢᵢE_{iib}E₄ | AlkLEᵥEᵥᵢ | E₅ | E_{b} |
| 1089 | E₁ₐE₂Eᵢᵢᵢ | AlkLEᵥEᵥᵢ | E₅ | E_{b} |
| 1090 | E_{1b}E₂Eᵢᵢᵢ | AlkLEᵥEᵥᵢ | E₅ | E_{b} |
| 1091 | E₁ₐE₂E₃Eᵢᵢᵢ | AlkLEᵥEᵥᵢ | E₅ | E_{b} |
| 1092 | E_{1b}E₂E₃Eᵢᵢᵢ | AlkLEᵥEᵥᵢ | E₅ | E_{b} |
| 1093 | E₁ₐE₂EᵢᵢᵢE₄ | AlkLEᵥEᵥᵢ | E₅ | E_{b} |
| 1094 | E_{1b}E₂EᵢᵢᵢE₄ | AlkLEᵥEᵥᵢ | E₅ | E_{b} |
| 1095 | E₁ₐE₂E₃EᵢᵢᵢE₄ | AlkLEᵥEᵥᵢ | E₅ | E_{b} |
| 1096 | E_{1b}E₂E₃EᵢᵢᵢE₄ | AlkLEᵥEᵥᵢ | E₅ | E_{b} |
| 1097 | E₁ₐE₂Eᵢᵥ | AlkLEᵥEᵥᵢ | E₅ | E_{b} |
| 1098 | E_{1b}E₂Eᵢᵥ | AlkLEᵥEᵥᵢ | E₅ | E_{b} |
| 1099 | E₁ₐE₂E₃Eᵢᵥ | AlkLEᵥEᵥᵢ | E₅ | E_{b} |
| 1100 | E_{1b}E₂E₃Eᵢᵥ | AlkLEᵥEᵥᵢ | E₅ | E_{b} |
| 1101 | E₁ₐE₂EᵢᵥE₄ | AlkLEᵥEᵥᵢ | E₅ | E_{b} |
| 1102 | E_{1b}E₂EᵢᵥE₄ | AlkLEᵥEᵥᵢ | E₅ | E_{b} |
| 1103 | E₁ₐE₂E₃EᵢᵥE₄ | AlkLEᵥEᵥᵢ | E₅ | E_{b} |
| 1104 | E_{1b}E₂E₃EᵢᵥE₄ | AlkLEᵥEᵥᵢ | E₅ | E_{b} |
| 1105 | E₁ₐE₂ | AlkLEᵥEᵥᵢ | E₄*E₅ | E_{b} |
| 1106 | E_{1b}E₂ | AlkLEᵥEᵥᵢ | E₄*E₅ | E_{b} |
| 1107 | E₁ₐE₂E₃ | AlkLEᵥEᵥᵢ | E₄*E₅ | E_{b} |
| 1108 | E_{1b}E₂E₃ | AlkLEᵥEᵥᵢ | E₄*E₅ | E_{b} |
| 1109 | E₁ₐE₂Eᵢ | AlkLEᵥEᵥᵢ | E₄*E₅ | E_{b} |
| 1110 | E_{1b}E₂Eᵢ | AlkLEᵥEᵥᵢ | E₄*E₅ | E_{b} |
| 1111 | E₁ₐE₂Eᵢᵢ | AlkLEᵥEᵥᵢ | E₄*E₅ | E_{b} |
| 1112 | E_{1b}E₂Eᵢᵢ | AlkLEᵥEᵥᵢ | E₄*E₅ | E_{b} |
| 1113 | E₁ₐE₂EᵢᵢE_{iib} | AlkLEᵥEᵥᵢ | E₄*E₅ | E_{b} |
| 1114 | E_{1b}E₂EᵢᵢE_{iib} | AlkLEᵥEᵥᵢ | E₄*E₅ | E_{b} |
| 1115 | E₁ₐE₂E₃Eᵢ | AlkLEᵥEᵥᵢ | E₄*E₅ | E_{b} |
| 1116 | E_{1b}E₂E₃Eᵢ | AlkLEᵥEᵥᵢ | E₄*E₅ | E_{b} |
| 1117 | E₁ₐE₂E₃Eᵢᵢ | AlkLEᵥEᵥᵢ | E₄*E₅ | E_{b} |
| 1118 | E_{1b}E₂E₃Eᵢᵢ | AlkLEᵥEᵥᵢ | E₄*E₅ | E_{b} |
| 1119 | E₁ₐE₂E₃EᵢᵢE_{iib} | AlkLEᵥEᵥᵢ | E₄*E₅ | E_{b} |
| 1120 | E_{1b}E₂E₃EᵢᵢE_{iib} | AlkLEᵥEᵥᵢ | E₄*E₅ | E_{b} |
| 1121 | E₁ₐE₂E₄ | AlkLEᵥEᵥᵢ | E₄*E₅ | E_{b} |
| 1122 | E_{1b}E₂E₄ | AlkLEᵥEᵥᵢ | E₄*E₅ | E_{b} |
| 1123 | E₁ₐE₂E₃E₄ | AlkLEᵥEᵥᵢ | E₄*E₅ | E_{b} |
| 1124 | E_{1b}E₂E₃E₄ | AlkLEᵥEᵥᵢ | E₄*E₅ | E_{b} |
| 1125 | E₁ₐE₂EᵢE₄ | AlkLEᵥEᵥᵢ | E₄*E₅ | E_{b} |
| 1126 | E_{1b}E₂EᵢE₄ | AlkLEᵥEᵥᵢ | E₄*E₅ | E_{b} |
| 1127 | E₁ₐE₂EᵢᵢE₄ | AlkLEᵥEᵥᵢ | E₄*E₅ | E_{b} |
| 1128 | E_{1b}E₂EᵢᵢE₄ | AlkLEᵥEᵥᵢ | E₄*E₅ | E_{b} |
| 1129 | E₁ₐE₂EᵢᵢE_{iib}E₄ | AlkLEᵥEᵥᵢ | E₄*E₅ | E_{b} |
| 1130 | E_{1b}E₂EᵢᵢE_{iib}E₄ | AlkLEᵥEᵥᵢ | E₄*E₅ | E_{b} |
| 1131 | E₁ₐE₂E₃EᵢE₄ | AlkLEᵥEᵥᵢ | E₄*E₅ | E_{b} |
| 1132 | E_{1b}E₂E₃EᵢE₄ | AlkLEᵥEᵥᵢ | E₄*E₅ | E_{b} |
| 1133 | E₁ₐE₂E₃EᵢᵢE₄ | AlkLEᵥEᵥᵢ | E₄*E₅ | E_{b} |
| 1134 | E_{1b}E₂E₃EᵢᵢE₄ | AlkLEᵥEᵥᵢ | E₄*E₅ | E_{b} |
| 1135 | E₁ₐE₂E₃EᵢᵢE_{iib}E₄ | AlkLEᵥEᵥᵢ | E₄*E₅ | E_{b} |
| 1136 | E_{1b}E₂E₃EᵢᵢE_{iib}E₄ | AlkLEᵥEᵥᵢ | E₄*E₅ | E_{b} |
| 1137 | E₁ₐE₂Eᵢᵢᵢ | AlkLEᵥEᵥᵢ | E₄*E₅ | E_{b} |
| 1138 | E_{1b}E₂Eᵢᵢᵢ | AlkLEᵥEᵥᵢ | E₄*E₅ | E_{b} |
| 1139 | E₁ₐE₂E₃Eᵢᵢᵢ | AlkLEᵥEᵥᵢ | E₄*E₅ | E_{b} |
| 1140 | E_{1b}E₂E₃Eᵢᵢᵢ | AlkLEᵥEᵥᵢ | E₄*E₅ | E_{b} |
| 1141 | E₁ₐE₂EᵢᵢᵢE₄ | AlkLEᵥEᵥᵢ | E₄*E₅ | E_{b} |
| 1142 | E_{1b}E₂EᵢᵢᵢE₄ | AlkLEᵥEᵥᵢ | E₄*E₅ | E_{b} |
| 1143 | E₁ₐE₂E₃EᵢᵢᵢE₄ | AlkLEᵥEᵥᵢ | E₄*E₅ | E_{b} |
| 1144 | E_{1b}E₂E₃EᵢᵢᵢE₄ | AlkLEᵥEᵥᵢ | E₄*E₅ | E_{b} |
| 1145 | E₁ₐE₂Eᵢᵥ | AlkLEᵥEᵥᵢ | E₄*E₅ | E_{b} |
| 1146 | E_{1b}E₂Eᵢᵥ | AlkLEᵥEᵥᵢ | E₄*E₅ | E_{b} |
| 1147 | E₁ₐE₂E₃Eᵢᵥ | AlkLEᵥEᵥᵢ | E₄*E₅ | E_{b} |
| 1148 | E_{1b}E₂E₃Eᵢᵥ | AlkLEᵥEᵥᵢ | E₄*E₅ | E_{b} |
| 1149 | E₁ₐE₂EᵢᵥE₄ | AlkLEᵥEᵥᵢ | E₄*E₅ | E_{b} |
| 1150 | E_{1b}E₂EᵢᵥE₄ | AlkLEᵥEᵥᵢ | E₄*E₅ | E_{b} |
| 1151 | E₁ₐE₂E₃EᵢᵥE₄ | AlkLEᵥEᵥᵢ | E₄*E₅ | E_{b} |
| 1152 | E_{1b}E₂E₃EᵢᵥE₄ | AlkLEᵥEᵥᵢ | E₄*E₅ | E_{b} |
| 1153 | E₁ₐE₂ | EᵥEᵥᵢ | | E_{d} |
| 1154 | E_{1b}E₂ | EᵥEᵥᵢ | | E_{d} |
| 1155 | E₁ₐE₂E₃ | EᵥEᵥᵢ | | E_{d} |
| 1156 | E_{1b}E₂E₃ | EᵥEᵥᵢ | | E_{d} |
| 1157 | E₁ₐE₂Eᵢ | EᵥEᵥᵢ | | E_{d} |
| 1158 | E_{1b}E₂Eᵢ | EᵥEᵥᵢ | | E_{d} |
| 1159 | E₁ₐE₂Eᵢᵢ | EᵥEᵥᵢ | | E_{d} |
| 1160 | E_{1b}E₂Eᵢᵢ | EᵥEᵥᵢ | | E_{d} |
| 1161 | E₁ₐE₂EᵢᵢE_{iib} | EᵥEᵥᵢ | | E_{d} |
| 1162 | E_{1b}E₂EᵢᵢE_{iib} | EᵥEᵥᵢ | | E_{d} |
| 1163 | E₁ₐE₂E₃Eᵢ | EᵥEᵥᵢ | | E_{d} |
| 1164 | E_{1b}E₂E₃Eᵢ | EᵥEᵥᵢ | | E_{d} |
| 1165 | E₁ₐE₂E₃Eᵢᵢ | EᵥEᵥᵢ | | E_{d} |
| 1166 | E_{1b}E₂E₃Eᵢᵢ | EᵥEᵥᵢ | | E_{d} |
| 1167 | E₁ₐE₂E₃EᵢᵢE_{iib} | EᵥEᵥᵢ | | E_{d} |
| 1168 | E_{1b}E₂E₃EᵢᵢE_{iib} | EᵥEᵥᵢ | | E_{d} |
| 1169 | E₁ₐE₂E₄ | EᵥEᵥᵢ | | E_{d} |
| 1170 | E_{1b}E₂E₄ | EᵥEᵥᵢ | | E_{d} |
| 1171 | E₁ₐE₂E₃E₄ | EᵥEᵥᵢ | | E_{d} |
| 1172 | E_{1b}E₂E₃E₄ | EᵥEᵥᵢ | | E_{d} |
| 1173 | E₁ₐE₂EᵢE₄ | EᵥEᵥᵢ | | E_{d} |
| 1174 | E_{1b}E₂EᵢE₄ | EᵥEᵥᵢ | | E_{d} |
| 1175 | E₁ₐE₂EᵢᵢE₄ | EᵥEᵥᵢ | | E_{d} |
| 1176 | E_{1b}E₂EᵢᵢE₄ | EᵥEᵥᵢ | | E_{d} |
| 1177 | E₁ₐE₂EᵢᵢE_{iib}E₄ | EᵥEᵥᵢ | | E_{d} |
| 1178 | E_{1b}E₂EᵢᵢE_{iib}E₄ | EᵥEᵥᵢ | | E_{d} |
| 1179 | E₁ₐE₂E₃EᵢE₄ | EᵥEᵥᵢ | | E_{d} |
| 1180 | E_{1b}E₂E₃EᵢE₄ | EᵥEᵥᵢ | | E_{d} |
| 1181 | E₁ₐE₂E₃EᵢᵢE₄ | EᵥEᵥᵢ | | E_{d} |
| 1182 | E_{1b}E₂E₃EᵢᵢE₄ | EᵥEᵥᵢ | | E_{d} |
| 1183 | E₁ₐE₂E₃EᵢᵢE_{iib}E₄ | EᵥEᵥᵢ | | E_{d} |
| 1184 | E_{1b}E₂E₃EᵢᵢE_{iib}E₄ | EᵥEᵥᵢ | | E_{d} |
| 1185 | E₁ₐE₂Eᵢᵢᵢ | EᵥEᵥᵢ | | E_{d} |
| 1186 | E_{1b}E₂Eᵢᵢᵢ | EᵥEᵥᵢ | | E_{d} |
| 1187 | E₁ₐE₂E₃Eᵢᵢᵢ | EᵥEᵥᵢ | | E_{d} |
| 1188 | E_{1b}E₂E₃Eᵢᵢᵢ | EᵥEᵥᵢ | | E_{d} |
| 1189 | E₁ₐE₂EᵢᵢᵢE₄ | EᵥEᵥᵢ | | E_{d} |
| 1190 | E_{1b}E₂EᵢᵢᵢE₄ | EᵥEᵥᵢ | | E_{d} |
| 1191 | E₁ₐE₂E₃EᵢᵢᵢE₄ | EᵥEᵥᵢ | | E_{d} |
| 1192 | E_{1b}E₂E₃EᵢᵢᵢE₄ | EᵥEᵥᵢ | | E_{d} |
| 1193 | E₁ₐE₂Eᵢᵥ | EᵥEᵥᵢ | | E_{d} |
| 1194 | E_{1b}E₂Eᵢᵥ | EᵥEᵥᵢ | | E_{d} |
| 1195 | E₁ₐE₂E₃Eᵢᵥ | EᵥEᵥᵢ | | E_{d} |
| 1196 | E_{1b}E₂E₃Eᵢᵥ | EᵥEᵥᵢ | | E_{d} |
| 1197 | E₁ₐE₂EᵢᵥE₄ | EᵥEᵥᵢ | | E_{d} |
| 1198 | E_{1b}E₂EᵢᵥE₄ | EᵥEᵥᵢ | | E_{d} |
| 1199 | E₁ₐE₂E₃EᵢᵥE₄ | EᵥEᵥᵢ | | E_{d} |
| 1200 | E_{1b}E₂E₃EᵢᵥE₄ | EᵥEᵥᵢ | | E_{d} |
| 1201 | E₁ₐE₂ | EᵥEᵥᵢ | E₄* | E_{d} |
| 1202 | E_{1b}E₂ | EᵥEᵥᵢ | E₄* | E_{d} |
| 1203 | E₁ₐE₂E₃ | EᵥEᵥᵢ | E₄* | E_{d} |
| 1204 | E_{1b}E₂E₃ | EᵥEᵥᵢ | E₄* | E_{d} |
| 1205 | E₁ₐE₂Eᵢ | EᵥEᵥᵢ | E₄* | E_{d} |
| 1206 | E_{1b}E₂Eᵢ | EᵥEᵥᵢ | E₄* | E_{d} |
| 1207 | E₁ₐE₂Eᵢᵢ | EᵥEᵥᵢ | E₄* | E_{d} |
| 1208 | E_{1b}E₂Eᵢᵢ | EᵥEᵥᵢ | E₄* | E_{d} |
| 1209 | E₁ₐE₂EᵢᵢE_{iib} | EᵥEᵥᵢ | E₄* | E_{d} |
| 1210 | E_{1b}E₂EᵢᵢE_{iib} | EᵥEᵥᵢ | E₄* | E_{d} |
| 1211 | E₁ₐE₂E₃Eᵢ | EᵥEᵥᵢ | E₄* | E_{d} |
| 1212 | E_{1b}E₂E₃Eᵢ | EᵥEᵥᵢ | E₄* | E_{d} |
| 1213 | E₁ₐE₂E₃Eᵢᵢ | EᵥEᵥᵢ | E₄* | E_{d} |
| 1214 | E_{1b}E₂E₃Eᵢᵢ | EᵥEᵥᵢ | E₄* | E_{d} |
| 1215 | E₁ₐE₂E₃EᵢᵢE_{iib} | EᵥEᵥᵢ | E₄* | E_{d} |
| 1216 | E_{1b}E₂E₃EᵢᵢE_{iib} | EᵥEᵥᵢ | E₄* | E_{d} |
| 1217 | E₁ₐE₂E₄ | EᵥEᵥᵢ | E₄* | E_{d} |
| 1218 | E_{1b}E₂E₄ | EᵥEᵥᵢ | E₄* | E_{d} |
| 1219 | E₁ₐE₂E₃E₄ | EᵥEᵥᵢ | E₄* | E_{d} |
| 1220 | E_{1b}E₂E₃E₄ | EᵥEᵥᵢ | E₄* | E_{d} |
| 1221 | E₁ₐE₂EᵢE₄ | EᵥEᵥᵢ | E₄* | E_{d} |
| 1222 | E_{1b}E₂EᵢE₄ | EᵥEᵥᵢ | E₄* | E_{d} |
| 1223 | E₁ₐE₂EᵢᵢE₄ | EᵥEᵥᵢ | E₄* | E_{d} |
| 1224 | E_{1b}E₂EᵢᵢE₄ | EᵥEᵥᵢ | E₄* | E_{d} |
| 1225 | E₁ₐE₂EᵢᵢE_{iib}E₄ | EᵥEᵥᵢ | E₄* | E_{d} |
| 1226 | E_{1b}E₂EᵢᵢE_{iib}E₄ | EᵥEᵥᵢ | E₄* | E_{d} |
| 1227 | E₁ₐE₂E₃EᵢE₄ | EᵥEᵥᵢ | E₄* | E_{d} |
| 1228 | E_{1b}E₂E₃EᵢE₄ | EᵥEᵥᵢ | E₄* | E_{d} |
| 1229 | E₁ₐE₂E₃EᵢᵢE₄ | EᵥEᵥᵢ | E₄* | E_{d} |
| 1230 | E_{1b}E₂E₃EᵢᵢE₄ | EᵥEᵥᵢ | E₄* | E_{d} |
| 1231 | E₁ₐE₂E₃EᵢᵢE_{iib}E₄ | EᵥEᵥᵢ | E₄* | E_{d} |
| 1232 | E_{1b}E₂E₃EᵢᵢE_{iib}E₄ | EᵥEᵥᵢ | E₄* | E_{d} |
| 1233 | E₁ₐE₂Eᵢᵢᵢ | EᵥEᵥᵢ | E₄* | E_{d} |
| 1234 | E_{1b}E₂Eᵢᵢᵢ | EᵥEᵥᵢ | E₄* | E_{d} |
| 1235 | E₁ₐE₂E₃Eᵢᵢᵢ | EᵥEᵥᵢ | E₄* | E_{d} |
| 1236 | E_{1b}E₂E₃Eᵢᵢᵢ | EᵥEᵥᵢ | E₄* | E_{d} |
| 1237 | E₁ₐE₂EᵢᵢᵢE₄ | EᵥEᵥᵢ | E₄* | E_{d} |
| 1238 | E_{1b}E₂EᵢᵢᵢE₄ | EᵥEᵥᵢ | E₄* | E_{d} |
| 1239 | E₁ₐE₂E₃EᵢᵢᵢE₄ | EᵥEᵥᵢ | E₄* | E_{d} |
| 1240 | E_{1b}E₂E₃EᵢᵢᵢE₄ | EᵥEᵥᵢ | E₄* | E_{d} |
| 1241 | E₁ₐE₂Eᵢᵥ | EᵥEᵥᵢ | E₄* | E_{d} |
| 1242 | E_{1b}E₂Eᵢᵥ | EᵥEᵥᵢ | E₄* | E_{d} |
| 1243 | E₁ₐE₂E₃Eᵢᵥ | EᵥEᵥᵢ | E₄* | E_{d} |
| 1244 | E_{1b}E₂E₃Eᵢᵥ | EᵥEᵥᵢ | E₄* | E_{d} |
| 1245 | E₁ₐE₂EᵢᵥE₄ | EᵥEᵥᵢ | E₄* | E_{d} |
| 1246 | E_{1b}E₂EᵢᵥE₄ | EᵥEᵥᵢ | E₄* | E_{d} |
| 1247 | E₁ₐE₂E₃EᵢᵥE₄ | EᵥEᵥᵢ | E₄* | E_{d} |
| 1248 | E_{1b}E₂E₃EᵢᵥE₄ | EᵥEᵥᵢ | E₄* | E_{d} |
| 1249 | E₁ₐE₂ | EᵥEᵥᵢ | E₅ | E_{d} |
| 1250 | E_{1b}E₂ | EᵥEᵥᵢ | E₅ | E_{d} |
| 1251 | E₁ₐE₂E₃ | EᵥEᵥᵢ | E₅ | E_{d} |
| 1252 | E_{1b}E₂E₃ | EᵥEᵥᵢ | E₅ | E_{d} |
| 1253 | E₁ₐE₂Eᵢ | EᵥEᵥᵢ | E₅ | E_{d} |
| 1254 | E_{1b}E₂Eᵢ | EᵥEᵥᵢ | E₅ | E_{d} |
| 1255 | E₁ₐE₂Eᵢᵢ | EᵥEᵥᵢ | E₅ | E_{d} |
| 1256 | E_{1b}E₂Eᵢᵢ | EᵥEᵥᵢ | E₅ | E_{d} |
| 1257 | E₁ₐE₂EᵢᵢE_{iib} | EᵥEᵥᵢ | E₅ | E_{d} |
| 1258 | E_{1b}E₂EᵢᵢE_{iib} | EᵥEᵥᵢ | E₅ | E_{d} |
| 1259 | E₁ₐE₂E₃Eᵢ | EᵥEᵥᵢ | E₅ | E_{d} |
| 1260 | E_{1b}E₂E₃Eᵢ | EᵥEᵥᵢ | E₅ | E_{d} |
| 1261 | E₁ₐE₂E₃Eᵢᵢ | EᵥEᵥᵢ | E₅ | E_{d} |
| 1262 | E_{1b}E₂E₃Eᵢᵢ | EᵥEᵥᵢ | E₅ | E_{d} |
| 1263 | E₁ₐE₂E₃EᵢᵢE_{iib} | EᵥEᵥᵢ | E₅ | E_{d} |
| 1264 | E_{1b}E₂E₃EᵢᵢE_{iib} | EᵥEᵥᵢ | E₅ | E_{d} |
| 1265 | E₁ₐE₂E₄ | EᵥEᵥᵢ | E₅ | E_{d} |
| 1266 | E_{1b}E₂E₄ | EᵥEᵥᵢ | E₅ | E_{d} |
| 1267 | E₁ₐE₂E₃E₄ | EᵥEᵥᵢ | E₅ | E_{d} |
| 1268 | E_{1b}E₂E₃E₄ | EᵥEᵥᵢ | E₅ | E_{d} |
| 1269 | E₁ₐE₂EᵢE₄ | EᵥEᵥᵢ | E₅ | E_{d} |
| 1270 | E_{1b}E₂EᵢE₄ | EᵥEᵥᵢ | E₅ | E_{d} |
| 1271 | E₁ₐE₂EᵢᵢE₄ | EᵥEᵥᵢ | E₅ | E_{d} |
| 1272 | E_{1b}E₂EᵢᵢE₄ | EᵥEᵥᵢ | E₅ | E_{d} |
| 1273 | E₁ₐE₂EᵢᵢE_{iib}E₄ | EᵥEᵥᵢ | E₅ | E_{d} |
| 1274 | E_{1b}E₂EᵢᵢE_{iib}E₄ | EᵥEᵥᵢ | E₅ | E_{d} |
| 1275 | E₁ₐE₂E₃EᵢE₄ | EᵥEᵥᵢ | E₅ | E_{d} |
| 1276 | E_{1b}E₂E₃EᵢE₄ | EᵥEᵥᵢ | E₅ | E_{d} |
| 1277 | E₁ₐE₂E₃EᵢᵢE₄ | EᵥEᵥᵢ | E₅ | E_{d} |
| 1278 | E_{1b}E₂E₃EᵢᵢE₄ | EᵥEᵥᵢ | E₅ | E_{d} |
| 1279 | E₁ₐE₂E₃EᵢᵢE_{iib}E₄ | EᵥEᵥᵢ | E₅ | E_{d} |
| 1280 | E_{1b}E₂E₃EᵢᵢE_{iib}E₄ | EᵥEᵥᵢ | E₅ | E_{d} |
| 1281 | E₁ₐE₂Eᵢᵢᵢ | EᵥEᵥᵢ | E₅ | E_{d} |
| 1282 | E_{1b}E₂Eᵢᵢᵢ | EᵥEᵥᵢ | E₅ | E_{d} |
| 1283 | E₁ₐE₂E₃Eᵢᵢᵢ | EᵥEᵥᵢ | E₅ | E_{d} |
| 1284 | E_{1b}E₂E₃Eᵢᵢᵢ | EᵥEᵥᵢ | E₅ | E_{d} |
| 1285 | E₁ₐE₂EᵢᵢᵢE₄ | EᵥEᵥᵢ | E₅ | E_{d} |
| 1286 | E_{1b}E₂EᵢᵢᵢE₄ | EᵥEᵥᵢ | E₅ | E_{d} |
| 1287 | E₁ₐE₂E₃EᵢᵢᵢE₄ | EᵥEᵥᵢ | E₅ | E_{d} |
| 1288 | E_{1b}E₂E₃EᵢᵢᵢE₄ | EᵥEᵥᵢ | E₅ | E_{d} |
| 1289 | E₁ₐE₂Eᵢᵥ | EᵥEᵥᵢ | E₅ | E_{d} |
| 1290 | E_{1b}E₂Eᵢᵥ | EᵥEᵥᵢ | E₅ | E_{d} |
| 1291 | E₁ₐE₂E₃Eᵢᵥ | EᵥEᵥᵢ | E₅ | E_{d} |
| 1292 | E_{1b}E₂E₃Eᵢᵥ | EᵥEᵥᵢ | E₅ | E_{d} |
| 1293 | E₁ₐE₂EᵢᵥE₄ | EᵥEᵥᵢ | E₅ | E_{d} |
| 1294 | E_{1b}E₂EᵢᵥE₄ | EᵥEᵥᵢ | E₅ | E_{d} |
| 1295 | E₁ₐE₂E₃EᵢᵥE₄ | EᵥEᵥᵢ | E₅ | E_{d} |
| 1296 | E_{1b}E₂E₃EᵢᵥE₄ | EᵥEᵥᵢ | E₅ | E_{d} |
| 1297 | E₁ₐE₂ | EᵥEᵥᵢ | E₄*E₅ | E_{d} |
| 1298 | E_{1b}E₂ | EᵥEᵥᵢ | E₄*E₅ | E_{d} |
| 1299 | E₁ₐE₂E₃ | EᵥEᵥᵢ | E₄*E₅ | E_{d} |
| 1300 | E_{1b}E₂E₃ | EᵥEᵥᵢ | E₄*E₅ | E_{d} |
| 1301 | E₁ₐE₂Eᵢ | EᵥEᵥᵢ | E₄*E₅ | E_{d} |
| 1302 | E_{1b}E₂Eᵢ | EᵥEᵥᵢ | E₄*E₅ | E_{d} |
| 1303 | E₁ₐE₂Eᵢᵢ | EᵥEᵥᵢ | E₄*E₅ | E_{d} |
| 1304 | E_{1b}E₂Eᵢᵢ | EᵥEᵥᵢ | E₄*E₅ | E_{d} |
| 1305 | E₁ₐE₂EᵢᵢE_{iib} | EᵥEᵥᵢ | E₄*E₅ | E_{d} |
| 1306 | E_{1b}E₂EᵢᵢE_{iib} | EᵥEᵥᵢ | E₄*E₅ | E_{d} |
| 1307 | E₁ₐE₂E₃Eᵢ | EᵥEᵥᵢ | E₄*E₅ | E_{d} |
| 1308 | E_{1b}E₂E₃Eᵢ | EᵥEᵥᵢ | E₄*E₅ | E_{d} |
| 1309 | E₁ₐE₂E₃Eᵢᵢ | EᵥEᵥᵢ | E₄*E₅ | E_{d} |
| 1310 | E_{1b}E₂E₃Eᵢᵢ | EᵥEᵥᵢ | E₄*E₅ | E_{d} |
| 1311 | E₁ₐE₂E₃EᵢᵢE_{iib} | EᵥEᵥᵢ | E₄*E₅ | E_{d} |
| 1312 | E_{1b}E₂E₃EᵢᵢE_{iib} | EᵥEᵥᵢ | E₄*E₅ | E_{d} |
| 1313 | E₁ₐE₂E₄ | EᵥEᵥᵢ | E₄*E₅ | E_{d} |
| 1314 | E_{1b}E₂E₄ | EᵥEᵥᵢ | E₄*E₅ | E_{d} |
| 1315 | E₁ₐE₂E₃E₄ | EᵥEᵥᵢ | E₄*E₅ | E_{d} |
| 1316 | E_{1b}E₂E₃E₄ | EᵥEᵥᵢ | E₄*E₅ | E_{d} |
| 1317 | E₁ₐE₂EᵢE₄ | EᵥEᵥᵢ | E₄*E₅ | E_{d} |
| 1318 | E_{1b}E₂EᵢE₄ | EᵥEᵥᵢ | E₄*E₅ | E_{d} |
| 1319 | E₁ₐE₂EᵢᵢE₄ | EᵥEᵥᵢ | E₄*E₅ | E_{d} |
| 1320 | E_{1b}E₂EᵢᵢE₄ | EᵥEᵥᵢ | E₄*E₅ | E_{d} |
| 1321 | E₁ₐE₂EᵢᵢE_{iib}E₄ | EᵥEᵥᵢ | E₄*E₅ | E_{d} |
| 1322 | E_{1b}E₂EᵢᵢE_{iib}E₄ | EᵥEᵥᵢ | E₄*E₅ | E_{d} |
| 1323 | E₁ₐE₂E₃EᵢE₄ | EᵥEᵥᵢ | E₄*E₅ | E_{d} |
| 1324 | E_{1b}E₂E₃EᵢE₄ | EᵥEᵥᵢ | E₄*E₅ | E_{d} |
| 1325 | E₁ₐE₂E₃EᵢᵢE₄ | EᵥEᵥᵢ | E₄*E₅ | E_{d} |
| 1326 | E_{1b}E₂E₃EᵢᵢE₄ | EᵥEᵥᵢ | E₄*E₅ | E_{d} |
| 1327 | E₁ₐE₂E₃EᵢᵢE_{iib}E₄ | EᵥEᵥᵢ | E₄*E₅ | E_{d} |
| 1328 | E_{1b}E₂E₃EᵢᵢE_{iib}E₄ | EᵥEᵥᵢ | E₄*E₅ | E_{d} |
| 1329 | E₁ₐE₂Eᵢᵢᵢ | EᵥEᵥᵢ | E₄*E₅ | E_{d} |
| 1330 | E_{1b}E₂Eᵢᵢᵢ | EᵥEᵥᵢ | E₄*E₅ | E_{d} |
| 1331 | E₁ₐE₂E₃Eᵢᵢᵢ | EᵥEᵥᵢ | E₄*E₅ | E_{d} |
| 1332 | E_{1b}E₂E₃Eᵢᵢᵢ | EᵥEᵥᵢ | E₄*E₅ | E_{d} |
| 1333 | E₁ₐE₂EᵢᵢᵢE₄ | EᵥEᵥᵢ | E₄*E₅ | E_{d} |
| 1334 | E_{1b}E₂EᵢᵢᵢE₄ | EᵥEᵥᵢ | E₄*E₅ | E_{d} |
| 1335 | E₁ₐE₂E₃EᵢᵢᵢE₄ | EᵥEᵥᵢ | E₄*E₅ | E_{d} |
| 1336 | E_{1b}E₂E₃EᵢᵢᵢE₄ | EᵥEᵥᵢ | E₄*E₅ | E_{d} |
| 1337 | E₁ₐE₂Eᵢᵥ | EᵥEᵥᵢ | E₄*E₅ | E_{d} |
| 1338 | E_{1b}E₂Eᵢᵥ | EᵥEᵥᵢ | E₄*E₅ | E_{d} |
| 1339 | E₁ₐE₂E₃Eᵢᵥ | EᵥEᵥᵢ | E₄*E₅ | E_{d} |
| 1340 | E_{1b}E₂E₃Eᵢᵥ | EᵥEᵥᵢ | E₄*E₅ | E_{d} |
| 1341 | E₁ₐE₂EᵢᵥE₄ | EᵥEᵥᵢ | E₄*E₅ | E_{d} |
| 1342 | E_{1b}E₂EᵢᵥE₄ | EᵥEᵥᵢ | E₄*E₅ | E_{d} |
| 1343 | E₁ₐE₂E₃EᵢᵥE₄ | EᵥEᵥᵢ | E₄*E₅ | E_{d} |
| 1344 | E_{1b}E₂E₃EᵢᵥE₄ | EᵥEᵥᵢ | E₄*E₅ | E_{d} |
| 1345 | E₁ₐE₂ | AlkLEᵥEᵥᵢ | | E_{d} |
| 1346 | E_{1b}E₂ | AlkLEᵥEᵥᵢ | | E_{d} |
| 1347 | E₁ₐE₂E₃ | AlkLEᵥEᵥᵢ | | E_{d} |
| 1348 | E_{1b}E₂E₃ | AlkLEᵥEᵥᵢ | | E_{d} |
| 1349 | E₁ₐE₂Eᵢ | AlkLEᵥEᵥᵢ | | E_{d} |
| 1350 | E_{1b}E₂Eᵢ | AlkLEᵥEᵥᵢ | | E_{d} |
| 1351 | E₁ₐE₂Eᵢᵢ | AlkLEᵥEᵥᵢ | | E_{d} |
| 1352 | E_{1b}E₂Eᵢᵢ | AlkLEᵥEᵥᵢ | | E_{d} |
| 1353 | E₁ₐE₂EᵢᵢE_{iib} | AlkLEᵥEᵥᵢ | | E_{d} |
| 1354 | E_{1b}E₂EᵢᵢE_{iib} | AlkLEᵥEᵥᵢ | | E_{d} |
| 1355 | E₁ₐE₂E₃Eᵢ | AlkLEᵥEᵥᵢ | | E_{d} |
| 1356 | E_{1b}E₂E₃Eᵢ | AlkLEᵥEᵥᵢ | | E_{d} |
| 1357 | E₁ₐE₂E₃Eᵢᵢ | AlkLEᵥEᵥᵢ | | E_{d} |
| 1358 | E_{1b}E₂E₃Eᵢᵢ | AlkLEᵥEᵥᵢ | | E_{d} |
| 1359 | E₁ₐE₂E₃EᵢᵢE_{iib} | AlkLEᵥEᵥᵢ | | E_{d} |
| 1360 | E_{1b}E₂E₃EᵢᵢE_{iib} | AlkLEᵥEᵥᵢ | | E_{d} |
| 1361 | E₁ₐE₂E₄ | AlkLEᵥEᵥᵢ | | E_{d} |
| 1362 | E_{1b}E₂E₄ | AlkLEᵥEᵥᵢ | | E_{d} |
| 1363 | E₁ₐE₂E₃E₄ | AlkLEᵥEᵥᵢ | | E_{d} |
| 1364 | E_{1b}E₂E₃E₄ | AlkLEᵥEᵥᵢ | | E_{d} |
| 1365 | E₁ₐE₂EᵢE₄ | AlkLEᵥEᵥᵢ | | E_{d} |
| 1366 | E_{1b}E₂EᵢE₄ | AlkLEᵥEᵥᵢ | | E_{d} |
| 1367 | E₁ₐE₂EᵢᵢE₄ | AlkLEᵥEᵥᵢ | | E_{d} |
| 1368 | E_{1b}E₂EᵢᵢE₄ | AlkLEᵥEᵥᵢ | | E_{d} |
| 1369 | E₁ₐE₂EᵢᵢE_{iib}E₄ | AlkLEᵥEᵥᵢ | | E_{d} |
| 1370 | E_{1b}E₂EᵢᵢE_{iib}E₄ | AlkLEᵥEᵥᵢ | | E_{d} |
| 1371 | E₁ₐE₂E₃EᵢE₄ | AlkLEᵥEᵥᵢ | | E_{d} |
| 1372 | E_{1b}E₂E₃EᵢE₄ | AlkLEᵥEᵥᵢ | | E_{d} |
| 1373 | E₁ₐE₂E₃EᵢᵢE₄ | AlkLEᵥEᵥᵢ | | E_{d} |
| 1374 | E_{1b}E₂E₃EᵢᵢE₄ | AlkLEᵥEᵥᵢ | | E_{d} |
| 1375 | E₁ₐE₂E₃EᵢᵢE_{iib}E₄ | AlkLEᵥEᵥᵢ | | E_{d} |
| 1376 | E_{1b}E₂E₃EᵢᵢE_{iib}E₄ | AlkLEᵥEᵥᵢ | | E_{d} |
| 1377 | E₁ₐE₂Eᵢᵢᵢ | AlkLEᵥEᵥᵢ | | E_{d} |
| 1378 | E_{1b}E₂Eᵢᵢᵢ | AlkLEᵥEᵥᵢ | | E_{d} |
| 1379 | E₁ₐE₂E₃Eᵢᵢᵢ | AlkLEᵥEᵥᵢ | | E_{d} |
| 1380 | E_{1b}E₂E₃Eᵢᵢᵢ | AlkLEᵥEᵥᵢ | | E_{d} |
| 1381 | E₁ₐE₂EᵢᵢᵢE₄ | AlkLEᵥEᵥᵢ | | E_{d} |
| 1382 | E_{1b}E₂EᵢᵢᵢE₄ | AlkLEᵥEᵥᵢ | | E_{d} |
| 1383 | E₁ₐE₂E₃EᵢᵢᵢE₄ | AlkLEᵥEᵥᵢ | | E_{d} |
| 1384 | E_{1b}E₂E₃EᵢᵢᵢE₄ | AlkLEᵥEᵥᵢ | | E_{d} |
| 1385 | E₁ₐE₂Eᵢᵥ | AlkLEᵥEᵥᵢ | | E_{d} |
| 1386 | E_{1b}E₂Eᵢᵥ | AlkLEᵥEᵥᵢ | | E_{d} |
| 1387 | E₁ₐE₂E₃Eᵢᵥ | AlkLEᵥEᵥᵢ | | E_{d} |
| 1388 | E_{1b}E₂E₃Eᵢᵥ | AlkLEᵥEᵥᵢ | | E_{d} |
| 1389 | E₁ₐE₂EᵢᵥE₄ | AlkLEᵥEᵥᵢ | | E_{d} |
| 1390 | E_{1b}E₂EᵢᵥE₄ | AlkLEᵥEᵥᵢ | | E_{d} |
| 1391 | E₁ₐE₂E₃EᵢᵥE₄ | AlkLEᵥEᵥᵢ | | E_{d} |
| 1392 | E_{1b}E₂E₃EᵢᵥE₄ | AlkLEᵥEᵥᵢ | | E_{d} |
| 1393 | E₁ₐE₂ | AlkLEᵥEᵥᵢ | E₄* | E_{d} |
| 1394 | E_{1b}E₂ | AlkLEᵥEᵥᵢ | E₄* | E_{d} |
| 1395 | E₁ₐE₂E₃ | AlkLEᵥEᵥᵢ | E₄* | E_{d} |
| 1396 | E_{1b}E₂E₃ | AlkLEᵥEᵥᵢ | E₄* | E_{d} |
| 1397 | E₁ₐE₂Eᵢ | AlkLEᵥEᵥᵢ | E₄* | E_{d} |
| 1398 | E_{1b}E₂Eᵢ | AlkLEᵥEᵥᵢ | E₄* | E_{d} |
| 1399 | E₁ₐE₂Eᵢᵢ | AlkLEᵥEᵥᵢ | E₄* | E_{d} |
| 1400 | E_{1b}E₂Eᵢᵢ | AlkLEᵥEᵥᵢ | E₄* | E_{d} |
| 1401 | E₁ₐE₂EᵢᵢE_{iib} | AlkLEᵥEᵥᵢ | E₄* | E_{d} |
| 1402 | E_{1b}E₂EᵢᵢE_{iib} | AlkLEᵥEᵥᵢ | E₄* | E_{d} |
| 1403 | E₁ₐE₂E₃Eᵢ | AlkLEᵥEᵥᵢ | E₄* | E_{d} |
| 1404 | E_{1b}E₂E₃Eᵢ | AlkLEᵥEᵥᵢ | E₄* | E_{d} |
| 1405 | E₁ₐE₂E₃Eᵢᵢ | AlkLEᵥEᵥᵢ | E₄* | E_{d} |
| 1406 | E_{1b}E₂E₃Eᵢᵢ | AlkLEᵥEᵥᵢ | E₄* | E_{d} |
| 1407 | E₁ₐE₂E₃EᵢᵢE_{iib} | AlkLEᵥEᵥᵢ | E₄* | E_{d} |
| 1408 | E_{1b}E₂E₃EᵢᵢE_{iib} | AlkLEᵥEᵥᵢ | E₄* | E_{d} |
| 1409 | E₁ₐE₂E₄ | AlkLEᵥEᵥᵢ | E₄* | E_{d} |
| 1410 | E_{1b}E₂E₄ | AlkLEᵥEᵥᵢ | E₄* | E_{d} |
| 1411 | E₁ₐE₂E₃E₄ | AlkLEᵥEᵥᵢ | E₄* | E_{d} |
| 1412 | E_{1b}E₂E₃E₄ | AlkLEᵥEᵥᵢ | E₄* | E_{d} |
| 1413 | E₁ₐE₂EᵢE₄ | AlkLEᵥEᵥᵢ | E₄* | E_{d} |
| 1414 | E_{1b}E₂EᵢE₄ | AlkLEᵥEᵥᵢ | E₄* | E_{d} |
| 1415 | E₁ₐE₂EᵢᵢE₄ | AlkLEᵥEᵥᵢ | E₄* | E_{d} |
| 1416 | E_{1b}E₂EᵢᵢE₄ | AlkLEᵥEᵥᵢ | E₄* | E_{d} |
| 1417 | E₁ₐE₂EᵢᵢE_{iib}E₄ | AlkLEᵥEᵥᵢ | E₄* | E_{d} |
| 1418 | E_{1b}E₂EᵢᵢE_{iib}E₄ | AlkLEᵥEᵥᵢ | E₄* | E_{d} |
| 1419 | E₁ₐE₂E₃EᵢE₄ | AlkLEᵥEᵥᵢ | E₄* | E_{d} |
| 1420 | E_{1b}E₂E₃EᵢE₄ | AlkLEᵥEᵥᵢ | E₄* | E_{d} |
| 1421 | E₁ₐE₂E₃EᵢᵢE₄ | AlkLEᵥEᵥᵢ | E₄* | E_{d} |
| 1422 | E_{1b}E₂E₃EᵢᵢE₄ | AlkLEᵥEᵥᵢ | E₄* | E_{d} |
| 1423 | E₁ₐE₂E₃EᵢᵢE_{iib}E₄ | AlkLEᵥEᵥᵢ | E₄* | E_{d} |
| 1424 | E_{1b}E₂E₃EᵢᵢE_{iib}E₄ | AlkLEᵥEᵥᵢ | E₄* | E_{d} |
| 1425 | E₁ₐE₂Eᵢᵢᵢ | AlkLEᵥEᵥᵢ | E₄* | E_{d} |
| 1426 | E_{1b}E₂Eᵢᵢᵢ | AlkLEᵥEᵥᵢ | E₄* | E_{d} |
| 1427 | E₁ₐE₂E₃Eᵢᵢᵢ | AlkLEᵥEᵥᵢ | E₄* | E_{d} |
| 1428 | E_{1b}E₂E₃Eᵢᵢᵢ | AlkLEᵥEᵥᵢ | E₄* | E_{d} |
| 1429 | E₁ₐE₂EᵢᵢᵢE₄ | AlkLEᵥEᵥᵢ | E₄* | E_{d} |
| 1430 | E_{1b}E₂EᵢᵢᵢE₄ | AlkLEᵥEᵥᵢ | E₄* | E_{d} |
| 1431 | E₁ₐE₂E₃EᵢᵢᵢE₄ | AlkLEᵥEᵥᵢ | E₄* | E_{d} |
| 1432 | E_{1b}E₂E₃EᵢᵢᵢE₄ | AlkLEᵥEᵥᵢ | E₄* | E_{d} |
| 1433 | E₁ₐE₂Eᵢᵥ | AlkLEᵥEᵥᵢ | E₄* | E_{d} |
| 1434 | E_{1b}E₂Eᵢᵥ | AlkLEᵥEᵥᵢ | E₄* | E_{d} |
| 1435 | E₁ₐE₂E₃Eᵢᵥ | AlkLEᵥEᵥᵢ | E₄* | E_{d} |
| 1436 | E_{1b}E₂E₃Eᵢᵥ | AlkLEᵥEᵥᵢ | E₄* | E_{d} |
| 1437 | E₁ₐE₂EᵢᵥE₄ | AlkLEᵥEᵥᵢ | E₄* | E_{d} |
| 1438 | E_{1b}E₂EᵢᵥE₄ | AlkLEᵥEᵥᵢ | E₄* | E_{d} |
| 1439 | E₁ₐE₂E₃EᵢᵥE₄ | AlkLEᵥEᵥᵢ | E₄* | E_{d} |
| 1440 | E_{1b}E₂E₃EᵢᵥE₄ | AlkLEᵥEᵥᵢ | E₄* | E_{d} |
| 1441 | E₁ₐE₂ | AlkLEᵥEᵥᵢ | E₅ | E_{d} |
| 1442 | E_{1b}E₂ | AlkLEᵥEᵥᵢ | E₅ | E_{d} |
| 1443 | E₁ₐE₂E₃ | AlkLEᵥEᵥᵢ | E₅ | E_{d} |
| 1444 | E_{1b}E₂E₃ | AlkLEᵥEᵥᵢ | E₅ | E_{d} |
| 1445 | E₁ₐE₂Eᵢ | AlkLEᵥEᵥᵢ | E₅ | E_{d} |
| 1446 | E_{1b}E₂Eᵢ | AlkLEᵥEᵥᵢ | E₅ | E_{d} |
| 1447 | E₁ₐE₂Eᵢᵢ | AlkLEᵥEᵥᵢ | E₅ | E_{d} |
| 1448 | E_{1b}E₂Eᵢᵢ | AlkLEᵥEᵥᵢ | E₅ | E_{d} |
| 1449 | E₁ₐE₂EᵢᵢE_{iib} | AlkLEᵥEᵥᵢ | E₅ | E_{d} |
| 1450 | E_{1b}E₂EᵢᵢE_{iib} | AlkLEᵥEᵥᵢ | E₅ | E_{d} |
| 1451 | E₁ₐE₂E₃Eᵢ | AlkLEᵥEᵥᵢ | E₅ | E_{d} |
| 1452 | E_{1b}E₂E₃Eᵢ | AlkLEᵥEᵥᵢ | E₅ | E_{d} |
| 1453 | E₁ₐE₂E₃Eᵢᵢ | AlkLEᵥEᵥᵢ | E₅ | E_{d} |
| 1454 | E_{1b}E₂E₃Eᵢᵢ | AlkLEᵥEᵥᵢ | E₅ | E_{d} |
| 1455 | E₁ₐE₂E₃EᵢᵢE_{iib} | AlkLEᵥEᵥᵢ | E₅ | E_{d} |
| 1456 | E_{1b}E₂E₃EᵢᵢE_{iib} | AlkLEᵥEᵥᵢ | E₅ | E_{d} |
| 1457 | E₁ₐE₂E₄ | AlkLEᵥEᵥᵢ | E₅ | E_{d} |
| 1458 | E_{1b}E₂E₄ | AlkLEᵥEᵥᵢ | E₅ | E_{d} |
| 1459 | E₁ₐE₂E₃E₄ | AlkLEᵥEᵥᵢ | E₅ | E_{d} |
| 1460 | E_{1b}E₂E₃E₄ | AlkLEᵥEᵥᵢ | E₅ | E_{d} |
| 1461 | E₁ₐE₂EᵢE₄ | AlkLEᵥEᵥᵢ | E₅ | E_{d} |
| 1462 | E_{1b}E₂EᵢE₄ | AlkLEᵥEᵥᵢ | E₅ | E_{d} |
| 1463 | E₁ₐE₂EᵢᵢE₄ | AlkLEᵥEᵥᵢ | E₅ | E_{d} |
| 1464 | E_{1b}E₂EᵢᵢE₄ | AlkLEᵥEᵥᵢ | E₅ | E_{d} |
| 1465 | E₁ₐE₂EᵢᵢE_{iib}E₄ | AlkLEᵥEᵥᵢ | E₅ | E_{d} |
| 1466 | E_{1b}E₂EᵢᵢE_{iib}E₄ | AlkLEᵥEᵥᵢ | E₅ | E_{d} |
| 1467 | E₁ₐE₂E₃EᵢE₄ | AlkLEᵥEᵥᵢ | E₅ | E_{d} |
| 1468 | E_{1b}E₂E₃EᵢE₄ | AlkLEᵥEᵥᵢ | E₅ | E_{d} |
| 1469 | E₁ₐE₂E₃EᵢᵢE₄ | AlkLEᵥEᵥᵢ | E₅ | E_{d} |
| 1470 | E_{1b}E₂E₃EᵢᵢE₄ | AlkLEᵥEᵥᵢ | E₅ | E_{d} |
| 1471 | E₁ₐE₂E₃EᵢᵢE_{iib}E₄ | AlkLEᵥEᵥᵢ | E₅ | E_{d} |
| 1472 | E_{1b}E₂E₃EᵢᵢE_{iib}E₄ | AlkLEᵥEᵥᵢ | E₅ | E_{d} |
| 1473 | E₁ₐE₂Eᵢᵢᵢ | AlkLEᵥEᵥᵢ | E₅ | E_{d} |
| 1474 | E_{1b}E₂Eᵢᵢᵢ | AlkLEᵥEᵥᵢ | E₅ | E_{d} |
| 1475 | E₁ₐE₂E₃Eᵢᵢᵢ | AlkLEᵥEᵥᵢ | E₅ | E_{d} |
| 1476 | E_{1b}E₂E₃Eᵢᵢᵢ | AlkLEᵥEᵥᵢ | E₅ | E_{d} |
| 1477 | E₁ₐE₂EᵢᵢᵢE₄ | AlkLEᵥEᵥᵢ | E₅ | E_{d} |
| 1478 | E_{1b}E₂EᵢᵢᵢE₄ | AlkLEᵥEᵥᵢ | E₅ | E_{d} |
| 1479 | E₁ₐE₂E₃EᵢᵢᵢE₄ | AlkLEᵥEᵥᵢ | E₅ | E_{d} |
| 1480 | E_{1b}E₂E₃EᵢᵢᵢE₄ | AlkLEᵥEᵥᵢ | E₅ | E_{d} |
| 1481 | E₁ₐE₂Eᵢᵥ | AlkLEᵥEᵥᵢ | E₅ | E_{d} |
| 1482 | E_{1b}E₂Eᵢᵥ | AlkLEᵥEᵥᵢ | E₅ | E_{d} |
| 1483 | E₁ₐE₂E₃Eᵢᵥ | AlkLEᵥEᵥᵢ | E₅ | E_{d} |
| 1484 | E_{1b}E₂E₃Eᵢᵥ | AlkLEᵥEᵥᵢ | E₅ | E_{d} |
| 1485 | E₁ₐE₂EᵢᵥE₄ | AlkLEᵥEᵥᵢ | E₅ | E_{d} |
| 1486 | E_{1b}E₂EᵢᵥE₄ | AlkLEᵥEᵥᵢ | E₅ | E_{d} |
| 1487 | E₁ₐE₂E₃EᵢᵥE₄ | AlkLEᵥEᵥᵢ | E₅ | E_{d} |
| 1488 | E_{1b}E₂E₃EᵢᵥE₄ | AlkLEᵥEᵥᵢ | E₅ | E_{d} |
| 1489 | E₁ₐE₂ | AlkLEᵥEᵥᵢ | E₄*E₅ | E_{d} |
| 1490 | E_{1b}E₂ | AlkLEᵥEᵥᵢ | E₄*E₅ | E_{d} |
| 1491 | E₁ₐE₂E₃ | AlkLEᵥEᵥᵢ | E₄*E₅ | E_{d} |
| 1492 | E_{1b}E₂E₃ | AlkLEᵥEᵥᵢ | E₄*E₅ | E_{d} |
| 1493 | E₁ₐE₂Eᵢ | AlkLEᵥEᵥᵢ | E₄*E₅ | E_{d} |
| 1494 | E_{1b}E₂Eᵢ | AlkLEᵥEᵥᵢ | E₄*E₅ | E_{d} |
| 1495 | E₁ₐE₂Eᵢᵢ | AlkLEᵥEᵥᵢ | E₄*E₅ | E_{d} |
| 1496 | E_{1b}E₂Eᵢᵢ | AlkLEᵥEᵥᵢ | E₄*E₅ | E_{d} |
| 1497 | E₁ₐE₂EᵢᵢE_{iib} | AlkLEᵥEᵥᵢ | E₄*E₅ | E_{d} |
| 1498 | E_{1b}E₂EᵢᵢE_{iib} | AlkLEᵥEᵥᵢ | E₄*E₅ | E_{d} |
| 1499 | E₁ₐE₂E₃Eᵢ | AlkLEᵥEᵥᵢ | E₄*E₅ | E_{d} |
| 1500 | E_{1b}E₂E₃Eᵢ | AlkLEᵥEᵥᵢ | E₄*E₅ | E_{d} |
| 1501 | E₁ₐE₂E₃Eᵢᵢ | AlkLEᵥEᵥᵢ | E₄*E₅ | E_{d} |
| 1502 | E_{1b}E₂E₃Eᵢᵢ | AlkLEᵥEᵥᵢ | E₄*E₅ | E_{d} |
| 1503 | E₁ₐE₂E₃EᵢᵢE_{iib} | AlkLEᵥEᵥᵢ | E₄*E₅ | E_{d} |
| 1504 | E_{1b}E₂E₃EᵢᵢE_{iib} | AlkLEᵥEᵥᵢ | E₄*E₅ | E_{d} |
| 1505 | E₁ₐE₂E₄ | AlkLEᵥEᵥᵢ | E₄*E₅ | E_{d} |
| 1506 | E_{1b}E₂E₄ | AlkLEᵥEᵥᵢ | E₄*E₅ | E_{d} |
| 1507 | E₁ₐE₂E₃E₄ | AlkLEᵥEᵥᵢ | E₄*E₅ | E_{d} |
| 1508 | E_{1b}E₂E₃E₄ | AlkLEᵥEᵥᵢ | E₄*E₅ | E_{d} |
| 1509 | E₁ₐE₂EᵢE₄ | AlkLEᵥEᵥᵢ | E₄*E₅ | E_{d} |
| 1510 | E_{1b}E₂EᵢE₄ | AlkLEᵥEᵥᵢ | E₄*E₅ | E_{d} |
| 1511 | E₁ₐE₂EᵢᵢE₄ | AlkLEᵥEᵥᵢ | E₄*E₅ | E_{d} |
| 1512 | E_{1b}E₂EᵢᵢE₄ | AlkLEᵥEᵥᵢ | E₄*E₅ | E_{d} |
| 1513 | E₁ₐE₂EᵢᵢE_{iib}E₄ | AlkLEᵥEᵥᵢ | E₄*E₅ | E_{d} |
| 1514 | E_{1b}E₂EᵢᵢE_{iib}E₄ | AlkLEᵥEᵥᵢ | E₄*E₅ | E_{d} |
| 1515 | E₁ₐE₂E₃EᵢE₄ | AlkLEᵥEᵥᵢ | E₄*E₅ | E_{d} |
| 1516 | E_{1b}E₂E₃EᵢE₄ | AlkLEᵥEᵥᵢ | E₄*E₅ | E_{d} |
| 1517 | E₁ₐE₂E₃EᵢᵢE₄ | AlkLEᵥEᵥᵢ | E₄*E₅ | E_{d} |
| 1518 | E_{1b}E₂E₃EᵢᵢE₄ | AlkLEᵥEᵥᵢ | E₄*E₅ | E_{d} |
| 1519 | E₁ₐE₂E₃EᵢᵢE_{iib}E₄ | AlkLEᵥEᵥᵢ | E₄*E₅ | E_{d} |
| 1520 | E_{1b}E₂E₃EᵢᵢE_{iib}E₄ | AlkLEᵥEᵥᵢ | E₄*E₅ | E_{d} |
| 1521 | E₁ₐE₂Eᵢᵢᵢ | AlkLEᵥEᵥᵢ | E₄*E₅ | E_{d} |
| 1522 | E_{1b}E₂Eᵢᵢᵢ | AlkLEᵥEᵥᵢ | E₄*E₅ | E_{d} |
| 1523 | E₁ₐE₂E₃Eᵢᵢᵢ | AlkLEᵥEᵥᵢ | E₄*E₅ | E_{d} |
| 1524 | E_{1b}E₂E₃Eᵢᵢᵢ | AlkLEᵥEᵥᵢ | E₄*E₅ | E_{d} |
| 1525 | E₁ₐE₂EᵢᵢᵢE₄ | AlkLEᵥEᵥᵢ | E₄*E₅ | E_{d} |
| 1526 | E_{1b}E₂EᵢᵢᵢE₄ | AlkLEᵥEᵥᵢ | E₄*E₅ | E_{d} |
| 1527 | E₁ₐE₂E₃EᵢᵢᵢE₄ | AlkLEᵥEᵥᵢ | E₄*E₅ | E_{d} |
| 1528 | E_{1b}E₂E₃EᵢᵢᵢE₄ | AlkLEᵥEᵥᵢ | E₄*E₅ | E_{d} |
| 1529 | E₁ₐE₂Eᵢᵥ | AlkLEᵥEᵥᵢ | E₄*E₅ | E_{d} |
| 1530 | E_{1b}E₂Eᵢᵥ | AlkLEᵥEᵥᵢ | E₄*E₅ | E_{d} |
| 1531 | E₁ₐE₂E₃Eᵢᵥ | AlkLEᵥEᵥᵢ | E₄*E₅ | E_{d} |
| 1532 | E_{1b}E₂E₃Eᵢᵥ | AlkLEᵥEᵥᵢ | E₄*E₅ | E_{d} |
| 1533 | E₁ₐE₂EᵢᵥE₄ | AlkLEᵥEᵥᵢ | E₄*E₅ | E_{d} |
| 1534 | E_{1b}E₂EᵢᵥE₄ | AlkLEᵥEᵥᵢ | E₄*E₅ | E_{d} |
| 1535 | E₁ₐE₂E₃EᵢᵥE₄ | AlkLEᵥEᵥᵢ | E₄*E₅ | E_{d} |
| 1536 | E_{1b}E₂E₃EᵢᵥE₄ | AlkLEᵥEᵥᵢ | E₄*E₅ | E_{d} |
| 1537 | E₁ₐE₂ | EᵥEᵥᵢ | | Eₑ |
| 1538 | E_{1b}E₂ | EᵥEᵥᵢ | | Eₑ |
| 1539 | E₁ₐE₂E₃ | EᵥEᵥᵢ | | Eₑ |
| 1540 | E_{1b}E₂E₃ | EᵥEᵥᵢ | | Eₑ |
| 1541 | E₁ₐE₂Eᵢ | EᵥEᵥᵢ | | Eₑ |
| 1542 | E_{1b}E₂Eᵢ | EᵥEᵥᵢ | | Eₑ |
| 1543 | E₁ₐE₂Eᵢᵢ | EᵥEᵥᵢ | | Eₑ |
| 1544 | E_{1b}E₂Eᵢᵢ | EᵥEᵥᵢ | | Eₑ |
| 1545 | E₁ₐE₂EᵢᵢE_{iib} | EᵥEᵥᵢ | | Eₑ |
| 1546 | E_{1b}E₂EᵢᵢE_{iib} | EᵥEᵥᵢ | | Eₑ |
| 1547 | E₁ₐE₂E₃Eᵢ | EᵥEᵥᵢ | | Eₑ |
| 1548 | E_{1b}E₂E₃Eᵢ | EᵥEᵥᵢ | | Eₑ |
| 1549 | E₁ₐE₂E₃Eᵢᵢ | EᵥEᵥᵢ | | Eₑ |
| 1550 | E_{1b}E₂E₃Eᵢᵢ | EᵥEᵥᵢ | | Eₑ |
| 1551 | E₁ₐE₂E₃EᵢᵢE_{iib} | EᵥEᵥᵢ | | Eₑ |
| 1552 | E_{1b}E₂E₃EᵢᵢE_{iib} | EᵥEᵥᵢ | | Eₑ |
| 1553 | E₁ₐE₂E₄ | EᵥEᵥᵢ | | Eₑ |
| 1554 | E_{1b}E₂E₄ | EᵥEᵥᵢ | | Eₑ |
| 1555 | E₁ₐE₂E₃E₄ | EᵥEᵥᵢ | | Eₑ |
| 1556 | E_{1b}E₂E₃E₄ | EᵥEᵥᵢ | | Eₑ |
| 1557 | E₁ₐE₂EᵢE₄ | EᵥEᵥᵢ | | Eₑ |
| 1558 | E_{1b}E₂EᵢE₄ | EᵥEᵥᵢ | | Eₑ |
| 1559 | E₁ₐE₂EᵢᵢE₄ | EᵥEᵥᵢ | | Eₑ |
| 1560 | E_{1b}E₂EᵢᵢE₄ | EᵥEᵥᵢ | | Eₑ |
| 1561 | E₁ₐE₂EᵢᵢE_{iib}E₄ | EᵥEᵥᵢ | | Eₑ |
| 1562 | E_{1b}E₂EᵢᵢE_{iib}E₄ | EᵥEᵥᵢ | | Eₑ |
| 1563 | E₁ₐE₂E₃EᵢE₄ | EᵥEᵥᵢ | | Eₑ |
| 1564 | E_{1b}E₂E₃EᵢE₄ | EᵥEᵥᵢ | | Eₑ |
| 1565 | E₁ₐE₂E₃EᵢᵢE₄ | EᵥEᵥᵢ | | Eₑ |
| 1566 | E_{1b}E₂E₃EᵢᵢE₄ | EᵥEᵥᵢ | | Eₑ |
| 1567 | E₁ₐE₂E₃EᵢᵢE_{iib}E₄ | EᵥEᵥᵢ | | Eₑ |
| 1568 | E_{1b}E₂E₃EᵢᵢE_{iib}E₄ | EᵥEᵥᵢ | | Eₑ |
| 1569 | E₁ₐE₂Eᵢᵢᵢ | EᵥEᵥᵢ | | Eₑ |
| 1570 | E_{1b}E₂Eᵢᵢᵢ | EᵥEᵥᵢ | | Eₑ |
| 1571 | E₁ₐE₂E₃Eᵢᵢᵢ | EᵥEᵥᵢ | | Eₑ |
| 1572 | E_{1b}E₂E₃Eᵢᵢᵢ | EᵥEᵥᵢ | | Eₑ |
| 1573 | E₁ₐE₂EᵢᵢᵢE₄ | EᵥEᵥᵢ | | Eₑ |
| 1574 | E_{1b}E₂EᵢᵢᵢE₄ | EᵥEᵥᵢ | | Eₑ |
| 1575 | E₁ₐE₂E₃EᵢᵢᵢE₄ | EᵥEᵥᵢ | | Eₑ |
| 1576 | E_{1b}E₂E₃EᵢᵢᵢE₄ | EᵥEᵥᵢ | | Eₑ |
| 1577 | E₁ₐE₂Eᵢᵥ | EᵥEᵥᵢ | | Eₑ |
| 1578 | E_{1b}E₂Eᵢᵥ | EᵥEᵥᵢ | | Eₑ |
| 1579 | E₁ₐE₂E₃Eᵢᵥ | EᵥEᵥᵢ | | Eₑ |
| 1580 | E_{1b}E₂E₃Eᵢᵥ | EᵥEᵥᵢ | | Eₑ |
| 1581 | E₁ₐE₂EᵢᵥE₄ | EᵥEᵥᵢ | | Eₑ |
| 1582 | E_{1b}E₂EᵢᵥE₄ | EᵥEᵥᵢ | | Eₑ |
| 1583 | E₁ₐE₂E₃EᵢᵥE₄ | EᵥEᵥᵢ | | Eₑ |
| 1584 | E_{1b}E₂E₃EᵢᵥE₄ | EᵥEᵥᵢ | | Eₑ |
| 1585 | E₁ₐE₂ | EᵥEᵥᵢ | E₄* | Eₑ |
| 1586 | E_{1b}E₂ | EᵥEᵥᵢ | E₄* | Eₑ |
| 1587 | E₁ₐE₂E₃ | EᵥEᵥᵢ | E₄* | Eₑ |
| 1588 | E_{1b}E₂E₃ | EᵥEᵥᵢ | E₄* | Eₑ |
| 1589 | E₁ₐE₂Eᵢ | EᵥEᵥᵢ | E₄* | Eₑ |
| 1590 | E_{1b}E₂Eᵢ | EᵥEᵥᵢ | E₄* | Eₑ |
| 1591 | E₁ₐE₂Eᵢᵢ | EᵥEᵥᵢ | E₄* | Eₑ |
| 1592 | E_{1b}E₂Eᵢᵢ | EᵥEᵥᵢ | E₄* | Eₑ |
| 1593 | E₁ₐE₂EᵢᵢE_{iib} | EᵥEᵥᵢ | E₄* | Eₑ |
| 1594 | E_{1b}E₂EᵢᵢE_{iib} | EᵥEᵥᵢ | E₄* | Eₑ |
| 1595 | E₁ₐE₂E₃Eᵢ | EᵥEᵥᵢ | E₄* | Eₑ |
| 1596 | E_{1b}E₂E₃Eᵢ | EᵥEᵥᵢ | E₄* | Eₑ |
| 1597 | E₁ₐE₂E₃Eᵢᵢ | EᵥEᵥᵢ | E₄* | Eₑ |
| 1598 | E_{1b}E₂E₃Eᵢᵢ | EᵥEᵥᵢ | E₄* | Eₑ |
| 1599 | E₁ₐE₂E₃EᵢᵢE_{iib} | EᵥEᵥᵢ | E₄* | Eₑ |
| 1600 | E_{1b}E₂E₃EᵢᵢE_{iib} | EᵥEᵥᵢ | E₄* | Eₑ |
| 1601 | E₁ₐE₂E₄ | EᵥEᵥᵢ | E₄* | Eₑ |
| 1602 | E_{1b}E₂E₄ | EᵥEᵥᵢ | E₄* | Eₑ |
| 1603 | E₁ₐE₂E₃E₄ | EᵥEᵥᵢ | E₄* | Eₑ |
| 1604 | E_{1b}E₂E₃E₄ | EᵥEᵥᵢ | E₄* | Eₑ |
| 1605 | E₁ₐE₂EᵢE₄ | EᵥEᵥᵢ | E₄* | Eₑ |
| 1606 | E_{1b}E₂EᵢE₄ | EᵥEᵥᵢ | E₄* | Eₑ |
| 1607 | E₁ₐE₂EᵢᵢE₄ | EᵥEᵥᵢ | E₄* | Eₑ |
| 1608 | E_{1b}E₂EᵢᵢE₄ | EᵥEᵥᵢ | E₄* | Eₑ |
| 1609 | E₁ₐE₂EᵢᵢE_{iib}E₄ | EᵥEᵥᵢ | E₄* | Eₑ |
| 1610 | E_{1b}E₂EᵢᵢE_{iib}E₄ | EᵥEᵥᵢ | E₄* | Eₑ |
| 1611 | E₁ₐE₂E₃EᵢE₄ | EᵥEᵥᵢ | E₄* | Eₑ |
| 1612 | E_{1b}E₂E₃EᵢE₄ | EᵥEᵥᵢ | E₄* | Eₑ |
| 1613 | E₁ₐE₂E₃EᵢᵢE₄ | EᵥEᵥᵢ | E₄* | Eₑ |
| 1614 | E_{1b}E₂E₃EᵢᵢE₄ | EᵥEᵥᵢ | E₄* | Eₑ |
| 1615 | E₁ₐE₂E₃EᵢᵢE_{iib}E₄ | EᵥEᵥᵢ | E₄* | Eₑ |
| 1616 | E_{1b}E₂E₃EᵢᵢE_{iib}E₄ | EᵥEᵥᵢ | E₄* | Eₑ |
| 1617 | E₁ₐE₂Eᵢᵢᵢ | EᵥEᵥᵢ | E₄* | Eₑ |
| 1618 | E_{1b}E₂Eᵢᵢᵢ | EᵥEᵥᵢ | E₄* | Eₑ |
| 1619 | E₁ₐE₂E₃Eᵢᵢᵢ | EᵥEᵥᵢ | E₄* | Eₑ |
| 1620 | E_{1b}E₂E₃Eᵢᵢᵢ | EᵥEᵥᵢ | E₄* | Eₑ |
| 1621 | E₁ₐE₂EᵢᵢᵢE₄ | EᵥEᵥᵢ | E₄* | Eₑ |
| 1622 | E_{1b}E₂EᵢᵢᵢE₄ | EᵥEᵥᵢ | E₄* | Eₑ |
| 1623 | E₁ₐE₂E₃EᵢᵢᵢE₄ | EᵥEᵥᵢ | E₄* | Eₑ |
| 1624 | E_{1b}E₂E₃EᵢᵢᵢE₄ | EᵥEᵥᵢ | E₄* | Eₑ |
| 1625 | E₁ₐE₂Eᵢᵥ | EᵥEᵥᵢ | E₄* | Eₑ |
| 1626 | E_{1b}E₂Eᵢᵥ | EᵥEᵥᵢ | E₄* | Eₑ |
| 1627 | E₁ₐE₂E₃Eᵢᵥ | EᵥEᵥᵢ | E₄* | Eₑ |
| 1628 | E_{1b}E₂E₃Eᵢᵥ | EᵥEᵥᵢ | E₄* | Eₑ |
| 1629 | E₁ₐE₂EᵢᵥE₄ | EᵥEᵥᵢ | E₄* | Eₑ |
| 1630 | E_{1b}E₂EᵢᵥE₄ | EᵥEᵥᵢ | E₄* | Eₑ |
| 1631 | E₁ₐE₂E₃EᵢᵥE₄ | EᵥEᵥᵢ | E₄* | Eₑ |
| 1632 | E_{1b}E₂E₃EᵢᵥE₄ | EᵥEᵥᵢ | E₄* | Eₑ |
| 1633 | E₁ₐE₂ | EᵥEᵥᵢ | E₅ | Eₑ |
| 1634 | E_{1b}E₂ | EᵥEᵥᵢ | E₅ | Eₑ |
| 1635 | E₁ₐE₂E₃ | EᵥEᵥᵢ | E₅ | Eₑ |
| 1636 | E_{1b}E₂E₃ | EᵥEᵥᵢ | E₅ | Eₑ |
| 1637 | E₁ₐE₂Eᵢ | EᵥEᵥᵢ | E₅ | Eₑ |
| 1638 | E_{1b}E₂Eᵢ | EᵥEᵥᵢ | E₅ | Eₑ |
| 1639 | E₁ₐE₂Eᵢᵢ | EᵥEᵥᵢ | E₅ | Eₑ |
| 1640 | E_{1b}E₂Eᵢᵢ | EᵥEᵥᵢ | E₅ | Eₑ |
| 1641 | E₁ₐE₂EᵢᵢE_{iib} | EᵥEᵥᵢ | E₅ | Eₑ |
| 1642 | E_{1b}E₂EᵢᵢE_{iib} | EᵥEᵥᵢ | E₅ | Eₑ |
| 1643 | E₁ₐE₂E₃Eᵢ | EᵥEᵥᵢ | E₅ | Eₑ |
| 1644 | E_{1b}E₂E₃Eᵢ | EᵥEᵥᵢ | E₅ | Eₑ |
| 1645 | E₁ₐE₂E₃Eᵢᵢ | EᵥEᵥᵢ | E₅ | Eₑ |
| 1646 | E_{1b}E₂E₃Eᵢᵢ | EᵥEᵥᵢ | E₅ | Eₑ |
| 1647 | E₁ₐE₂E₃EᵢᵢE_{iib} | EᵥEᵥᵢ | E₅ | Eₑ |
| 1648 | E_{1b}E₂E₃EᵢᵢE_{iib} | EᵥEᵥᵢ | E₅ | Eₑ |
| 1649 | E₁ₐE₂E₄ | EᵥEᵥᵢ | E₅ | Eₑ |
| 1650 | E_{1b}E₂E₄ | EᵥEᵥᵢ | E₅ | Eₑ |
| 1651 | E₁ₐE₂E₃E₄ | EᵥEᵥᵢ | E₅ | Eₑ |
| 1652 | E_{1b}E₂E₃E₄ | EᵥEᵥᵢ | E₅ | Eₑ |
| 1653 | E₁ₐE₂EᵢE₄ | EᵥEᵥᵢ | E₅ | Eₑ |
| 1654 | E_{1b}E₂EᵢE₄ | EᵥEᵥᵢ | E₅ | Eₑ |
| 1655 | E₁ₐE₂EᵢᵢE₄ | EᵥEᵥᵢ | E₅ | Eₑ |
| 1656 | E_{1b}E₂EᵢᵢE₄ | EᵥEᵥᵢ | E₅ | Eₑ |
| 1657 | E₁ₐE₂EᵢᵢE_{iib}E₄ | EᵥEᵥᵢ | E₅ | Eₑ |
| 1658 | E_{1b}E₂EᵢᵢE_{iib}E₄ | EᵥEᵥᵢ | E₅ | Eₑ |
| 1659 | E₁ₐE₂E₃EᵢE₄ | EᵥEᵥᵢ | E₅ | Eₑ |
| 1660 | E_{1b}E₂E₃EᵢE₄ | EᵥEᵥᵢ | E₅ | Eₑ |
| 1661 | E₁ₐE₂E₃EᵢᵢE₄ | EᵥEᵥᵢ | E₅ | Eₑ |
| 1662 | E_{1b}E₂E₃EᵢᵢE₄ | EᵥEᵥᵢ | E₅ | Eₑ |
| 1663 | E₁ₐE₂E₃EᵢᵢE_{iib}E₄ | EᵥEᵥᵢ | E₅ | Eₑ |
| 1664 | E_{1b}E₂E₃EᵢᵢE_{iib}E₄ | EᵥEᵥᵢ | E₅ | Eₑ |
| 1665 | E₁ₐE₂Eᵢᵢᵢ | EᵥEᵥᵢ | E₅ | Eₑ |
| 1666 | E_{1b}E₂Eᵢᵢᵢ | EᵥEᵥᵢ | E₅ | Eₑ |
| 1667 | E₁ₐE₂E₃Eᵢᵢᵢ | EᵥEᵥᵢ | E₅ | Eₑ |
| 1668 | E_{1b}E₂E₃Eᵢᵢᵢ | EᵥEᵥᵢ | E₅ | Eₑ |
| 1669 | E₁ₐE₂EᵢᵢᵢE₄ | EᵥEᵥᵢ | E₅ | Eₑ |
| 1670 | E_{1b}E₂EᵢᵢᵢE₄ | EᵥEᵥᵢ | E₅ | Eₑ |
| 1671 | E₁ₐE₂E₃EᵢᵢᵢE₄ | EᵥEᵥᵢ | E₅ | Eₑ |
| 1672 | E_{1b}E₂E₃EᵢᵢᵢE₄ | EᵥEᵥᵢ | E₅ | Eₑ |
| 1673 | E₁ₐE₂Eᵢᵥ | EᵥEᵥᵢ | E₅ | Eₑ |
| 1674 | E_{1b}E₂Eᵢᵥ | EᵥEᵥᵢ | E₅ | Eₑ |
| 1675 | E₁ₐE₂E₃Eᵢᵥ | EᵥEᵥᵢ | E₅ | Eₑ |
| 1676 | E_{1b}E₂E₃Eᵢᵥ | EᵥEᵥᵢ | E₅ | Eₑ |
| 1677 | E₁ₐE₂EᵢᵥE₄ | EᵥEᵥᵢ | E₅ | Eₑ |
| 1678 | E_{1b}E₂EᵢᵥE₄ | EᵥEᵥᵢ | E₅ | Eₑ |
| 1679 | E₁ₐE₂E₃EᵢᵥE₄ | EᵥEᵥᵢ | E₅ | Eₑ |
| 1680 | E_{1b}E₂E₃EᵢᵥE₄ | EᵥEᵥᵢ | E₅ | Eₑ |
| 1681 | E₁ₐE₂ | EᵥEᵥᵢ | E₄*E₅ | Eₑ |
| 1682 | E_{1b}E₂ | EᵥEᵥᵢ | E₄*E₅ | Eₑ |
| 1683 | E₁ₐE₂E₃ | EᵥEᵥᵢ | E₄*E₅ | Eₑ |
| 1684 | E_{1b}E₂E₃ | EᵥEᵥᵢ | E₄*E₅ | Eₑ |
| 1685 | E₁ₐE₂Eᵢ | EᵥEᵥᵢ | E₄*E₅ | Eₑ |
| 1686 | E_{1b}E₂Eᵢ | EᵥEᵥᵢ | E₄*E₅ | Eₑ |
| 1687 | E₁ₐE₂Eᵢᵢ | EᵥEᵥᵢ | E₄*E₅ | Eₑ |
| 1688 | E_{1b}E₂Eᵢᵢ | EᵥEᵥᵢ | E₄*E₅ | Eₑ |
| 1689 | E₁ₐE₂EᵢᵢE_{iib} | EᵥEᵥᵢ | E₄*E₅ | Eₑ |
| 1690 | E_{1b}E₂EᵢᵢE_{iib} | EᵥEᵥᵢ | E₄*E₅ | Eₑ |
| 1691 | E₁ₐE₂E₃Eᵢ | EᵥEᵥᵢ | E₄*E₅ | Eₑ |
| 1692 | E_{1b}E₂E₃Eᵢ | EᵥEᵥᵢ | E₄*E₅ | Eₑ |
| 1693 | E₁ₐE₂E₃Eᵢᵢ | EᵥEᵥᵢ | E₄*E₅ | Eₑ |
| 1694 | E_{1b}E₂E₃Eᵢᵢ | EᵥEᵥᵢ | E₄*E₅ | Eₑ |
| 1695 | E₁ₐE₂E₃EᵢᵢE_{iib} | EᵥEᵥᵢ | E₄*E₅ | Eₑ |
| 1696 | E_{1b}E₂E₃EᵢᵢE_{iib} | EᵥEᵥᵢ | E₄*E₅ | Eₑ |
| 1697 | E₁ₐE₂E₄ | EᵥEᵥᵢ | E₄*E₅ | Eₑ |
| 1698 | E_{1b}E₂E₄ | EᵥEᵥᵢ | E₄*E₅ | Eₑ |
| 1699 | E₁ₐE₂E₃E₄ | EᵥEᵥᵢ | E₄*E₅ | Eₑ |
| 1700 | E_{1b}E₂E₃E₄ | EᵥEᵥᵢ | E₄*E₅ | Eₑ |
| 1701 | E₁ₐE₂EᵢE₄ | EᵥEᵥᵢ | E₄*E₅ | Eₑ |
| 1702 | E_{1b}E₂EᵢE₄ | EᵥEᵥᵢ | E₄*E₅ | Eₑ |
| 1703 | E₁ₐE₂EᵢᵢE₄ | EᵥEᵥᵢ | E₄*E₅ | Eₑ |
| 1704 | E_{1b}E₂EᵢᵢE₄ | EᵥEᵥᵢ | E₄*E₅ | Eₑ |
| 1705 | E₁ₐE₂EᵢᵢE_{iib}E₄ | EᵥEᵥᵢ | E₄*E₅ | Eₑ |
| 1706 | E_{1b}E₂EᵢᵢE_{iib}E₄ | EᵥEᵥᵢ | E₄*E₅ | Eₑ |
| 1707 | E₁ₐE₂E₃EᵢE₄ | EᵥEᵥᵢ | E₄*E₅ | Eₑ |
| 1708 | E_{1b}E₂E₃EᵢE₄ | EᵥEᵥᵢ | E₄*E₅ | Eₑ |
| 1709 | E₁ₐE₂E₃EᵢᵢE₄ | EᵥEᵥᵢ | E₄*E₅ | Eₑ |
| 1710 | E_{1b}E₂E₃EᵢᵢE₄ | EᵥEᵥᵢ | E₄*E₅ | Eₑ |
| 1711 | E₁ₐE₂E₃EᵢᵢE_{iib}E₄ | EᵥEᵥᵢ | E₄*E₅ | Eₑ |
| 1712 | E_{1b}E₂E₃EᵢᵢE_{iib}E₄ | EᵥEᵥᵢ | E₄*E₅ | Eₑ |
| 1713 | E₁ₐE₂Eᵢᵢᵢ | EᵥEᵥᵢ | E₄*E₅ | Eₑ |
| 1714 | E_{1b}E₂Eᵢᵢᵢ | EᵥEᵥᵢ | E₄*E₅ | Eₑ |
| 1715 | E₁ₐE₂E₃Eᵢᵢᵢ | EᵥEᵥᵢ | E₄*E₅ | Eₑ |
| 1716 | E_{1b}E₂E₃Eᵢᵢᵢ | EᵥEᵥᵢ | E₄*E₅ | Eₑ |
| 1717 | E₁ₐE₂EᵢᵢᵢE₄ | EᵥEᵥᵢ | E₄*E₅ | Eₑ |
| 1718 | E_{1b}E₂EᵢᵢᵢE₄ | EᵥEᵥᵢ | E₄*E₅ | Eₑ |
| 1719 | E₁ₐE₂E₃EᵢᵢᵢE₄ | EᵥEᵥᵢ | E₄*E₅ | Eₑ |
| 1720 | E_{1b}E₂E₃EᵢᵢᵢE₄ | EᵥEᵥᵢ | E₄*E₅ | Eₑ |
| 1721 | E₁ₐE₂Eᵢᵥ | EᵥEᵥᵢ | E₄*E₅ | Eₑ |
| 1722 | E_{1b}E₂Eᵢᵥ | EᵥEᵥᵢ | E₄*E₅ | Eₑ |
| 1723 | E₁ₐE₂E₃Eᵢᵥ | EᵥEᵥᵢ | E₄*E₅ | Eₑ |
| 1724 | E_{1b}E₂E₃Eᵢᵥ | EᵥEᵥᵢ | E₄*E₅ | Eₑ |
| 1725 | E₁ₐE₂EᵢᵥE₄ | EᵥEᵥᵢ | E₄*E₅ | Eₑ |
| 1726 | E_{1b}E₂EᵢᵥE₄ | EᵥEᵥᵢ | E₄*E₅ | Eₑ |
| 1727 | E₁ₐE₂E₃EᵢᵥE₄ | EᵥEᵥᵢ | E₄*E₅ | Eₑ |
| 1728 | E_{1b}E₂E₃EᵢᵥE₄ | EᵥEᵥᵢ | E₄*E₅ | Eₑ |
| 1729 | E₁ₐE₂ | AlkLEᵥEᵥᵢ | | Eₑ |
| 1730 | E_{1b}E₂ | AlkLEᵥEᵥᵢ | | Eₑ |
| 1731 | E₁ₐE₂E₃ | AlkLEᵥEᵥᵢ | | Eₑ |
| 1732 | E_{1b}E₂E₃ | AlkLEᵥEᵥᵢ | | Eₑ |
| 1733 | E₁ₐE₂Eᵢ | AlkLEᵥEᵥᵢ | | Eₑ |
| 1734 | E_{1b}E₂Eᵢ | AlkLEᵥEᵥᵢ | | Eₑ |
| 1735 | E₁ₐE₂Eᵢᵢ | AlkLEᵥEᵥᵢ | | Eₑ |
| 1736 | E_{1b}E₂Eᵢᵢ | AlkLEᵥEᵥᵢ | | Eₑ |
| 1737 | E₁ₐE₂EᵢᵢE_{iib} | AlkLEᵥEᵥᵢ | | Eₑ |
| 1738 | E_{1b}E₂EᵢᵢE_{iib} | AlkLEᵥEᵥᵢ | | Eₑ |
| 1739 | E₁ₐE₂E₃Eᵢ | AlkLEᵥEᵥᵢ | | Eₑ |
| 1740 | E_{1b}E₂E₃Eᵢ | AlkLEᵥEᵥᵢ | | Eₑ |
| 1741 | E₁ₐE₂E₃Eᵢᵢ | AlkLEᵥEᵥᵢ | | Eₑ |
| 1742 | E_{1b}E₂E₃Eᵢᵢ | AlkLEᵥEᵥᵢ | | Eₑ |
| 1743 | E₁ₐE₂E₃EᵢᵢE_{iib} | AlkLEᵥEᵥᵢ | | Eₑ |
| 1744 | E_{1b}E₂E₃EᵢᵢE_{iib} | AlkLEᵥEᵥᵢ | | Eₑ |
| 1745 | E₁ₐE₂E₄ | AlkLEᵥEᵥᵢ | | Eₑ |
| 1746 | E_{1b}E₂E₄ | AlkLEᵥEᵥᵢ | | Eₑ |
| 1747 | E₁ₐE₂E₃E₄ | AlkLEᵥEᵥᵢ | | Eₑ |
| 1748 | E_{1b}E₂E₃E₄ | AlkLEᵥEᵥᵢ | | Eₑ |
| 1749 | E₁ₐE₂EᵢE₄ | AlkLEᵥEᵥᵢ | | Eₑ |
| 1750 | E_{1b}E₂EᵢE₄ | AlkLEᵥEᵥᵢ | | Eₑ |
| 1751 | E₁ₐE₂EᵢᵢE₄ | AlkLEᵥEᵥᵢ | | Eₑ |
| 1752 | E_{1b}E₂EᵢᵢE₄ | AlkLEᵥEᵥᵢ | | Eₑ |
| 1753 | E₁ₐE₂EᵢᵢE_{iib}E₄ | AlkLEᵥEᵥᵢ | | Eₑ |
| 1754 | E_{1b}E₂EᵢᵢE_{iib}E₄ | AlkLEᵥEᵥᵢ | | Eₑ |
| 1755 | E₁ₐE₂E₃EᵢE₄ | AlkLEᵥEᵥᵢ | | Eₑ |
| 1756 | E_{1b}E₂E₃EᵢE₄ | AlkLEᵥEᵥᵢ | | Eₑ |
| 1757 | E₁ₐE₂E₃EᵢᵢE₄ | AlkLEᵥEᵥᵢ | | Eₑ |
| 1758 | E_{1b}E₂E₃EᵢᵢE₄ | AlkLEᵥEᵥᵢ | | Eₑ |
| 1759 | E₁ₐE₂E₃EᵢᵢE_{iib}E₄ | AlkLEᵥEᵥᵢ | | Eₑ |
| 1760 | E_{1b}E₂E₃EᵢᵢE_{iib}E₄ | AlkLEᵥEᵥᵢ | | Eₑ |
| 1761 | E₁ₐE₂Eᵢᵢᵢ | AlkLEᵥEᵥᵢ | | Eₑ |
| 1762 | E_{1b}E₂Eᵢᵢᵢ | AlkLEᵥEᵥᵢ | | Eₑ |
| 1763 | E₁ₐE₂E₃Eᵢᵢᵢ | AlkLEᵥEᵥᵢ | | Eₑ |
| 1764 | E_{1b}E₂E₃Eᵢᵢᵢ | AlkLEᵥEᵥᵢ | | Eₑ |
| 1765 | E₁ₐE₂EᵢᵢᵢE₄ | AlkLEᵥEᵥᵢ | | Eₑ |
| 1766 | E_{1b}E₂EᵢᵢᵢE₄ | AlkLEᵥEᵥᵢ | | Eₑ |
| 1767 | E₁ₐE₂E₃EᵢᵢᵢE₄ | AlkLEᵥEᵥᵢ | | Eₑ |
| 1768 | E_{1b}E₂E₃EᵢᵢᵢE₄ | AlkLEᵥEᵥᵢ | | Eₑ |
| 1769 | E₁ₐE₂Eᵢᵥ | AlkLEᵥEᵥᵢ | | Eₑ |
| 1770 | E_{1b}E₂Eᵢᵥ | AlkLEᵥEᵥᵢ | | Eₑ |
| 1771 | E₁ₐE₂E₃Eᵢᵥ | AlkLEᵥEᵥᵢ | | Eₑ |
| 1772 | E_{1b}E₂E₃Eᵢᵥ | AlkLEᵥEᵥᵢ | | Eₑ |
| 1773 | E₁ₐE₂EᵢᵥE₄ | AlkLEᵥEᵥᵢ | | Eₑ |
| 1774 | E_{1b}E₂EᵢᵥE₄ | AlkLEᵥEᵥᵢ | | Eₑ |
| 1775 | E₁ₐE₂E₃EᵢᵥE₄ | AlkLEᵥEᵥᵢ | | Eₑ |
| 1776 | E_{1b}E₂E₃EᵢᵥE₄ | AlkLEᵥEᵥᵢ | | Eₑ |
| 1777 | E₁ₐE₂ | AlkLEᵥEᵥᵢ | E₄* | Eₑ |
| 1778 | E_{1b}E₂ | AlkLEᵥEᵥᵢ | E₄* | Eₑ |
| 1779 | E₁ₐE₂E₃ | AlkLEᵥEᵥᵢ | E₄* | Eₑ |
| 1780 | E_{1b}E₂E₃ | AlkLEᵥEᵥᵢ | E₄* | Eₑ |
| 1781 | E₁ₐE₂Eᵢ | AlkLEᵥEᵥᵢ | E₄* | Eₑ |
| 1782 | E_{1b}E₂Eᵢ | AlkLEᵥEᵥᵢ | E₄* | Eₑ |
| 1783 | E₁ₐE₂Eᵢᵢ | AlkLEᵥEᵥᵢ | E₄* | Eₑ |
| 1784 | E_{1b}E₂Eᵢᵢ | AlkLEᵥEᵥᵢ | E₄* | Eₑ |
| 1785 | E₁ₐE₂EᵢᵢE_{iib} | AlkLEᵥEᵥᵢ | E₄* | Eₑ |
| 1786 | E_{1b}E₂EᵢᵢE_{iib} | AlkLEᵥEᵥᵢ | E₄* | Eₑ |
| 1787 | E₁ₐE₂E₃Eᵢ | AlkLEᵥEᵥᵢ | E₄* | Eₑ |
| 1788 | E_{1b}E₂E₃Eᵢ | AlkLEᵥEᵥᵢ | E₄* | Eₑ |
| 1789 | E₁ₐE₂E₃Eᵢᵢ | AlkLEᵥEᵥᵢ | E₄* | Eₑ |
| 1790 | E_{1b}E₂E₃Eᵢᵢ | AlkLEᵥEᵥᵢ | E₄* | Eₑ |
| 1791 | E₁ₐE₂E₃EᵢᵢE_{iib} | AlkLEᵥEᵥᵢ | E₄* | Eₑ |
| 1792 | E_{1b}E₂E₃EᵢᵢE_{iib} | AlkLEᵥEᵥᵢ | E₄* | Eₑ |
| 1793 | E₁ₐE₂E₄ | AlkLEᵥEᵥᵢ | E₄* | Eₑ |
| 1794 | E_{1b}E₂E₄ | AlkLEᵥEᵥᵢ | E₄* | Eₑ |
| 1795 | E₁ₐE₂E₃E₄ | AlkLEᵥEᵥᵢ | E₄* | Eₑ |
| 1796 | E_{1b}E₂E₃E₄ | AlkLEᵥEᵥᵢ | E₄* | Eₑ |
| 1797 | E₁ₐE₂EᵢE₄ | AlkLEᵥEᵥᵢ | E₄* | Eₑ |
| 1798 | E_{1b}E₂EᵢE₄ | AlkLEᵥEᵥᵢ | E₄* | Eₑ |
| 1799 | E₁ₐE₂EᵢᵢE₄ | AlkLEᵥEᵥᵢ | E₄* | Eₑ |
| 1800 | E_{1b}E₂EᵢᵢE₄ | AlkLEᵥEᵥᵢ | E₄* | Eₑ |
| 1801 | E₁ₐE₂EᵢᵢE_{iib}E₄ | AlkLEᵥEᵥᵢ | E₄* | Eₑ |
| 1802 | E_{1b}E₂EᵢᵢE_{iib}E₄ | AlkLEᵥEᵥᵢ | E₄* | Eₑ |
| 1803 | E₁ₐE₂E₃EᵢE₄ | AlkLEᵥEᵥᵢ | E₄* | Eₑ |
| 1804 | E_{1b}E₂E₃EᵢE₄ | AlkLEᵥEᵥᵢ | E₄* | Eₑ |
| 1805 | E₁ₐE₂E₃EᵢᵢE₄ | AlkLEᵥEᵥᵢ | E₄* | Eₑ |
| 1806 | E_{1b}E₂E₃EᵢᵢE₄ | AlkLEᵥEᵥᵢ | E₄* | Eₑ |
| 1807 | E₁ₐE₂E₃EᵢᵢE_{iib}E₄ | AlkLEᵥEᵥᵢ | E₄* | Eₑ |
| 1808 | E_{1b}E₂E₃EᵢᵢE_{iib}E₄ | AlkLEᵥEᵥᵢ | E₄* | Eₑ |
| 1809 | E₁ₐE₂Eᵢᵢᵢ | AlkLEᵥEᵥᵢ | E₄* | Eₑ |
| 1810 | E_{1b}E₂Eᵢᵢᵢ | AlkLEᵥEᵥᵢ | E₄* | Eₑ |
| 1811 | E₁ₐE₂E₃Eᵢᵢᵢ | AlkLEᵥEᵥᵢ | E₄* | Eₑ |
| 1812 | E_{1b}E₂E₃Eᵢᵢᵢ | AlkLEᵥEᵥᵢ | E₄* | Eₑ |
| 1813 | E₁ₐE₂EᵢᵢᵢE₄ | AlkLEᵥEᵥᵢ | E₄* | Eₑ |
| 1814 | E_{1b}E₂EᵢᵢᵢE₄ | AlkLEᵥEᵥᵢ | E₄* | Eₑ |
| 1815 | E₁ₐE₂E₃EᵢᵢᵢE₄ | AlkLEᵥEᵥᵢ | E₄* | Eₑ |
| 1816 | E_{1b}E₂E₃EᵢᵢᵢE₄ | AlkLEᵥEᵥᵢ | E₄* | Eₑ |
| 1817 | E₁ₐE₂Eᵢᵥ | AlkLEᵥEᵥᵢ | E₄* | Eₑ |
| 1818 | E_{1b}E₂Eᵢᵥ | AlkLEᵥEᵥᵢ | E₄* | Eₑ |
| 1819 | E₁ₐE₂E₃Eᵢᵥ | AlkLEᵥEᵥᵢ | E₄* | Eₑ |
| 1820 | E_{1b}E₂E₃Eᵢᵥ | AlkLEᵥEᵥᵢ | E₄* | Eₑ |
| 1821 | E₁ₐE₂EᵢᵥE₄ | AlkLEᵥEᵥᵢ | E₄* | Eₑ |
| 1822 | E_{1b}E₂EᵢᵥE₄ | AlkLEᵥEᵥᵢ | E₄* | Eₑ |
| 1823 | E₁ₐE₂E₃EᵢᵥE₄ | AlkLEᵥEᵥᵢ | E₄* | Eₑ |
| 1824 | E_{1b}E₂E₃EᵢᵥE₄ | AlkLEᵥEᵥᵢ | E₄* | Eₑ |
| 1825 | E₁ₐE₂ | AlkLEᵥEᵥᵢ | E₅ | Eₑ |
| 1826 | E_{1b}E₂ | AlkLEᵥEᵥᵢ | E₅ | Eₑ |
| 1827 | E₁ₐE₂E₃ | AlkLEᵥEᵥᵢ | E₅ | Eₑ |
| 1828 | E_{1b}E₂E₃ | AlkLEᵥEᵥᵢ | E₅ | Eₑ |
| 1829 | E₁ₐE₂Eᵢ | AlkLEᵥEᵥᵢ | E₅ | Eₑ |
| 1830 | E_{1b}E₂Eᵢ | AlkLEᵥEᵥᵢ | E₅ | Eₑ |
| 1831 | E₁ₐE₂Eᵢᵢ | AlkLEᵥEᵥᵢ | E₅ | Eₑ |
| 1832 | E_{1b}E₂Eᵢᵢ | AlkLEᵥEᵥᵢ | E₅ | Eₑ |
| 1833 | E₁ₐE₂EᵢᵢE_{iib} | AlkLEᵥEᵥᵢ | E₅ | Eₑ |
| 1834 | E_{1b}E₂EᵢᵢE_{iib} | AlkLEᵥEᵥᵢ | E₅ | Eₑ |
| 1835 | E₁ₐE₂E₃Eᵢ | AlkLEᵥEᵥᵢ | E₅ | Eₑ |
| 1836 | E_{1b}E₂E₃Eᵢ | AlkLEᵥEᵥᵢ | E₅ | Eₑ |
| 1837 | E₁ₐE₂E₃Eᵢᵢ | AlkLEᵥEᵥᵢ | E₅ | Eₑ |
| 1838 | E_{1b}E₂E₃Eᵢᵢ | AlkLEᵥEᵥᵢ | E₅ | Eₑ |
| 1839 | E₁ₐE₂E₃EᵢᵢE_{iib} | AlkLEᵥEᵥᵢ | E₅ | Eₑ |
| 1840 | E_{1b}E₂E₃EᵢᵢE_{iib} | AlkLEᵥEᵥᵢ | E₅ | Eₑ |
| 1841 | E₁ₐE₂E₄ | AlkLEᵥEᵥᵢ | E₅ | Eₑ |
| 1842 | E_{1b}E₂E₄ | AlkLEᵥEᵥᵢ | E₅ | Eₑ |
| 1843 | E₁ₐE₂E₃E₄ | AlkLEᵥEᵥᵢ | E₅ | Eₑ |
| 1844 | E_{1b}E₂E₃E₄ | AlkLEᵥEᵥᵢ | E₅ | Eₑ |
| 1845 | E₁ₐE₂EᵢE₄ | AlkLEᵥEᵥᵢ | E₅ | Eₑ |
| 1846 | E_{1b}E₂EᵢE₄ | AlkLEᵥEᵥᵢ | E₅ | Eₑ |
| 1847 | E₁ₐE₂EᵢᵢE₄ | AlkLEᵥEᵥᵢ | E₅ | Eₑ |
| 1848 | E_{1b}E₂EᵢᵢE₄ | AlkLEᵥEᵥᵢ | E₅ | Eₑ |
| 1849 | E₁ₐE₂EᵢᵢE_{iib}E₄ | AlkLEᵥEᵥᵢ | E₅ | Eₑ |
| 1850 | E_{1b}E₂EᵢᵢE_{iib}E₄ | AlkLEᵥEᵥᵢ | E₅ | Eₑ |
| 1851 | E₁ₐE₂E₃EᵢE₄ | AlkLEᵥEᵥᵢ | E₅ | Eₑ |
| 1852 | E_{1b}E₂E₃EᵢE₄ | AlkLEᵥEᵥᵢ | E₅ | Eₑ |
| 1853 | E₁ₐE₂E₃EᵢᵢE₄ | AlkLEᵥEᵥᵢ | E₅ | Eₑ |
| 1854 | E_{1b}E₂E₃EᵢᵢE₄ | AlkLEᵥEᵥᵢ | E₅ | Eₑ |
| 1855 | E₁ₐE₂E₃EᵢᵢE_{iib}E₄ | AlkLEᵥEᵥᵢ | E₅ | Eₑ |
| 1856 | E_{1b}E₂E₃EᵢᵢE_{iib}E₄ | AlkLEᵥEᵥᵢ | E₅ | Eₑ |
| 1857 | E₁ₐE₂Eᵢᵢᵢ | AlkLEᵥEᵥᵢ | E₅ | Eₑ |
| 1858 | E_{1b}E₂Eᵢᵢᵢ | AlkLEᵥEᵥᵢ | E₅ | Eₑ |
| 1859 | E₁ₐE₂E₃Eᵢᵢᵢ | AlkLEᵥEᵥᵢ | E₅ | Eₑ |
| 1860 | E_{1b}E₂E₃Eᵢᵢᵢ | AlkLEᵥEᵥᵢ | E₅ | Eₑ |
| 1861 | E₁ₐE₂EᵢᵢᵢE₄ | AlkLEᵥEᵥᵢ | E₅ | Eₑ |
| 1862 | E_{1b}E₂EᵢᵢᵢE₄ | AlkLEᵥEᵥᵢ | E₅ | Eₑ |
| 1863 | E₁ₐE₂E₃EᵢᵢᵢE₄ | AlkLEᵥEᵥᵢ | E₅ | Eₑ |
| 1864 | E_{1b}E₂E₃EᵢᵢᵢE₄ | AlkLEᵥEᵥᵢ | E₅ | Eₑ |
| 1865 | E₁ₐE₂Eᵢᵥ | AlkLEᵥEᵥᵢ | E₅ | Eₑ |
| 1866 | E_{1b}E₂Eᵢᵥ | AlkLEᵥEᵥᵢ | E₅ | Eₑ |
| 1867 | E₁ₐE₂E₃Eᵢᵥ | AlkLEᵥEᵥᵢ | E₅ | Eₑ |
| 1868 | E_{1b}E₂E₃Eᵢᵥ | AlkLEᵥEᵥᵢ | E₅ | Eₑ |
| 1869 | E₁ₐE₂EᵢᵥE₄ | AlkLEᵥEᵥᵢ | E₅ | Eₑ |
| 1870 | E_{1b}E₂EᵢᵥE₄ | AlkLEᵥEᵥᵢ | E₅ | Eₑ |
| 1871 | E₁ₐE₂E₃EᵢᵥE₄ | AlkLEᵥEᵥᵢ | E₅ | Eₑ |
| 1872 | E_{1b}E₂E₃EᵢᵥE₄ | AlkLEᵥEᵥᵢ | E₅ | Eₑ |
| 1873 | E₁ₐE₂ | AlkLEᵥEᵥᵢ | E₄*E₅ | Eₑ |
| 1874 | E_{1b}E₂ | AlkLEᵥEᵥᵢ | E₄*E₅ | Eₑ |
| 1875 | E₁ₐE₂E₃ | AlkLEᵥEᵥᵢ | E₄*E₅ | Eₑ |
| 1876 | E_{1b}E₂E₃ | AlkLEᵥEᵥᵢ | E₄*E₅ | Eₑ |
| 1877 | E₁ₐE₂Eᵢ | AlkLEᵥEᵥᵢ | E₄*E₅ | Eₑ |
| 1878 | E_{1b}E₂Eᵢ | AlkLEᵥEᵥᵢ | E₄*E₅ | Eₑ |
| 1879 | E₁ₐE₂Eᵢᵢ | AlkLEᵥEᵥᵢ | E₄*E₅ | Eₑ |
| 1880 | E_{1b}E₂Eᵢᵢ | AlkLEᵥEᵥᵢ | E₄*E₅ | Eₑ |
| 1881 | E₁ₐE₂EᵢᵢE_{iib} | AlkLEᵥEᵥᵢ | E₄*E₅ | Eₑ |
| 1882 | E_{1b}E₂EᵢᵢE_{iib} | AlkLEᵥEᵥᵢ | E₄*E₅ | Eₑ |
| 1883 | E₁ₐE₂E₃Eᵢ | AlkLEᵥEᵥᵢ | E₄*E₅ | Eₑ |
| 1884 | E_{1b}E₂E₃Eᵢ | AlkLEᵥEᵥᵢ | E₄*E₅ | Eₑ |
| 1885 | E₁ₐE₂E₃Eᵢᵢ | AlkLEᵥEᵥᵢ | E₄*E₅ | Eₑ |
| 1886 | E_{1b}E₂E₃Eᵢᵢ | AlkLEᵥEᵥᵢ | E₄*E₅ | Eₑ |
| 1887 | E₁ₐE₂E₃EᵢᵢE_{iib} | AlkLEᵥEᵥᵢ | E₄*E₅ | Eₑ |
| 1888 | E_{1b}E₂E₃EᵢᵢE_{iib} | AlkLEᵥEᵥᵢ | E₄*E₅ | Eₑ |
| 1889 | E₁ₐE₂E₄ | AlkLEᵥEᵥᵢ | E₄*E₅ | Eₑ |
| 1890 | E_{1b}E₂E₄ | AlkLEᵥEᵥᵢ | E₄*E₅ | Eₑ |
| 1891 | E₁ₐE₂E₃E₄ | AlkLEᵥEᵥᵢ | E₄*E₅ | Eₑ |
| 1892 | E_{1b}E₂E₃E₄ | AlkLEᵥEᵥᵢ | E₄*E₅ | Eₑ |
| 1893 | E₁ₐE₂EᵢE₄ | AlkLEᵥEᵥᵢ | E₄*E₅ | Eₑ |
| 1894 | E_{1b}E₂EᵢE₄ | AlkLEᵥEᵥᵢ | E₄*E₅ | Eₑ |
| 1895 | E₁ₐE₂EᵢᵢE₄ | AlkLEᵥEᵥᵢ | E₄*E₅ | Eₑ |
| 1896 | E_{1b}E₂EᵢᵢE₄ | AlkLEᵥEᵥᵢ | E₄*E₅ | Eₑ |
| 1897 | E₁ₐE₂EᵢᵢE_{iib}E₄ | AlkLEᵥEᵥᵢ | E₄*E₅ | Eₑ |
| 1898 | E_{1b}E₂EᵢᵢE_{iib}E₄ | AlkLEᵥEᵥᵢ | E₄*E₅ | Eₑ |
| 1899 | E₁ₐE₂E₃EᵢE₄ | AlkLEᵥEᵥᵢ | E₄*E₅ | Eₑ |
| 1900 | E_{1b}E₂E₃EᵢE₄ | AlkLEᵥEᵥᵢ | E₄*E₅ | Eₑ |
| 1901 | E₁ₐE₂E₃EᵢᵢE₄ | AlkLEᵥEᵥᵢ | E₄*E₅ | Eₑ |
| 1902 | E_{1b}E₂E₃EᵢᵢE₄ | AlkLEᵥEᵥᵢ | E₄*E₅ | Eₑ |
| 1903 | E₁ₐE₂E₃EᵢᵢE_{iib}E₄ | AlkLEᵥEᵥᵢ | E₄*E₅ | Eₑ |
| 1904 | E_{1b}E₂E₃EᵢᵢE_{iib}E₄ | AlkLEᵥEᵥᵢ | E₄*E₅ | Eₑ |
| 1905 | E₁ₐE₂Eᵢᵢᵢ | AlkLEᵥEᵥᵢ | E₄*E₅ | Eₑ |
| 1906 | E_{1b}E₂Eᵢᵢᵢ | AlkLEᵥEᵥᵢ | E₄*E₅ | Eₑ |
| 1907 | E₁ₐE₂E₃Eᵢᵢᵢ | AlkLEᵥEᵥᵢ | E₄*E₅ | Eₑ |
| 1908 | E_{1b}E₂E₃Eᵢᵢᵢ | AlkLEᵥEᵥᵢ | E₄*E₅ | Eₑ |
| 1909 | E₁ₐE₂EᵢᵢᵢE₄ | AlkLEᵥEᵥᵢ | E₄*E₅ | Eₑ |
| 1910 | E_{1b}E₂EᵢᵢᵢE₄ | AlkLEᵥEᵥᵢ | E₄*E₅ | Eₑ |
| 1911 | E₁ₐE₂E₃EᵢᵢᵢE₄ | AlkLEᵥEᵥᵢ | E₄*E₅ | Eₑ |
| 1912 | E_{1b}E₂E₃EᵢᵢᵢE₄ | AlkLEᵥEᵥᵢ | E₄*E₅ | Eₑ |
| 1913 | E₁ₐE₂Eᵢᵥ | AlkLEᵥEᵥᵢ | E₄*E₅ | Eₑ |
| 1914 | E_{1b}E₂Eᵢᵥ | AlkLEᵥEᵥᵢ | E₄*E₅ | Eₑ |
| 1915 | E₁ₐE₂E₃Eᵢᵥ | AlkLEᵥEᵥᵢ | E₄*E₅ | Eₑ |
| 1916 | E_{1b}E₂E₃Eᵢᵥ | AlkLEᵥEᵥᵢ | E₄*E₅ | Eₑ |
| 1917 | E₁ₐE₂EᵢᵥE₄ | AlkLEᵥEᵥᵢ | E₄*E₅ | Eₑ |
| 1918 | E_{1b}E₂EᵢᵥE₄ | AlkLEᵥEᵥᵢ | E₄*E₅ | Eₑ |
| 1919 | E₁ₐE₂E₃EᵢᵥE₄ | AlkLEᵥEᵥᵢ | E₄*E₅ | Eₑ |
| 1920 | E_{1b}E₂E₃EᵢᵥE₄ | AlkLEᵥEᵥᵢ | E₄*E₅ | Eₑ |
| 1921 | E₁ₐE₂ | EᵥEᵥᵢ | | E_{f} |
| 1922 | E_{1b}E₂ | EᵥEᵥᵢ | | E_{f} |
| 1923 | E₁ₐE₂E₃ | EᵥEᵥᵢ | | E_{f} |
| 1924 | E_{1b}E₂E₃ | EᵥEᵥᵢ | | E_{f} |
| 1925 | E₁ₐE₂Eᵢ | EᵥEᵥᵢ | | E_{f} |
| 1926 | E_{1b}E₂Eᵢ | EᵥEᵥᵢ | | E_{f} |
| 1927 | E₁ₐE₂Eᵢᵢ | EᵥEᵥᵢ | | E_{f} |
| 1928 | E_{1b}E₂Eᵢᵢ | EᵥEᵥᵢ | | E_{f} |
| 1929 | E₁ₐE₂EᵢᵢE_{iib} | EᵥEᵥᵢ | | E_{f} |
| 1930 | E_{1b}E₂EᵢᵢE_{iib} | EᵥEᵥᵢ | | E_{f} |
| 1931 | E₁ₐE₂E₃Eᵢ | EᵥEᵥᵢ | | E_{f} |
| 1932 | E_{1b}E₂E₃Eᵢ | EᵥEᵥᵢ | | E_{f} |
| 1933 | E₁ₐE₂E₃Eᵢᵢ | EᵥEᵥᵢ | | E_{f} |
| 1934 | E_{1b}E₂E₃Eᵢᵢ | EᵥEᵥᵢ | | E_{f} |
| 1935 | E₁ₐE₂E₃EᵢᵢE_{iib} | EᵥEᵥᵢ | | E_{f} |
| 1936 | E_{1b}E₂E₃EᵢᵢE_{iib} | EᵥEᵥᵢ | | E_{f} |
| 1937 | E₁ₐE₂E₄ | EᵥEᵥᵢ | | E_{f} |
| 1938 | E_{1b}E₂E₄ | EᵥEᵥᵢ | | E_{f} |
| 1939 | E₁ₐE₂E₃E₄ | EᵥEᵥᵢ | | E_{f} |
| 1940 | E_{1b}E₂E₃E₄ | EᵥEᵥᵢ | | E_{f} |
| 1941 | E₁ₐE₂EᵢE₄ | EᵥEᵥᵢ | | E_{f} |
| 1942 | E_{1b}E₂EᵢE₄ | EᵥEᵥᵢ | | E_{f} |
| 1943 | E₁ₐE₂EᵢᵢE₄ | EᵥEᵥᵢ | | E_{f} |
| 1944 | E_{1b}E₂EᵢᵢE₄ | EᵥEᵥᵢ | | E_{f} |
| 1945 | E₁ₐE₂EᵢᵢE_{iib}E₄ | EᵥEᵥᵢ | | E_{f} |
| 1946 | E_{1b}E₂EᵢᵢE_{iib}E₄ | EᵥEᵥᵢ | | E_{f} |
| 1947 | E₁ₐE₂E₃EᵢE₄ | EᵥEᵥᵢ | | E_{f} |
| 1948 | E_{1b}E₂E₃EᵢE₄ | EᵥEᵥᵢ | | E_{f} |
| 1949 | E₁ₐE₂E₃EᵢᵢE₄ | EᵥEᵥᵢ | | E_{f} |
| 1950 | E_{1b}E₂E₃EᵢᵢE₄ | EᵥEᵥᵢ | | E_{f} |
| 1951 | E₁ₐE₂E₃EᵢᵢE_{iib}E₄ | EᵥEᵥᵢ | | E_{f} |
| 1952 | E_{1b}E₂E₃EᵢᵢE_{iib}E₄ | EᵥEᵥᵢ | | E_{f} |
| 1953 | E₁ₐE₂Eᵢᵢᵢ | EᵥEᵥᵢ | | E_{f} |
| 1954 | E_{1b}E₂Eᵢᵢᵢ | EᵥEᵥᵢ | | E_{f} |
| 1955 | E₁ₐE₂E₃Eᵢᵢᵢ | EᵥEᵥᵢ | | E_{f} |
| 1956 | E_{1b}E₂E₃Eᵢᵢᵢ | EᵥEᵥᵢ | | E_{f} |
| 1957 | E₁ₐE₂EᵢᵢᵢE₄ | EᵥEᵥᵢ | | E_{f} |
| 1958 | E_{1b}E₂EᵢᵢᵢE₄ | EᵥEᵥᵢ | | E_{f} |
| 1959 | E₁ₐE₂E₃EᵢᵢᵢE₄ | EᵥEᵥᵢ | | E_{f} |
| 1960 | E_{1b}E₂E₃EᵢᵢᵢE₄ | EᵥEᵥᵢ | | E_{f} |
| 1961 | E₁ₐE₂Eᵢᵥ | EᵥEᵥᵢ | | E_{f} |
| 1962 | E_{1b}E₂Eᵢᵥ | EᵥEᵥᵢ | | E_{f} |
| 1963 | E₁ₐE₂E₃Eᵢᵥ | EᵥEᵥᵢ | | E_{f} |
| 1964 | E_{1b}E₂E₃Eᵢᵥ | EᵥEᵥᵢ | | E_{f} |
| 1965 | E₁ₐE₂EᵢᵥE₄ | EᵥEᵥᵢ | | E_{f} |
| 1966 | E_{1b}E₂EᵢᵥE₄ | EᵥEᵥᵢ | | E_{f} |
| 1967 | E₁ₐE₂E₃EᵢᵥE₄ | EᵥEᵥᵢ | | E_{f} |
| 1968 | E_{1b}E₂E₃EᵢᵥE₄ | EᵥEᵥᵢ | | E_{f} |
| 1969 | E₁ₐE₂ | EᵥEᵥᵢ | E₄* | E_{f} |
| 1970 | E_{1b}E₂ | EᵥEᵥᵢ | E₄* | E_{f} |
| 1971 | E₁ₐE₂E₃ | EᵥEᵥᵢ | E₄* | E_{f} |
| 1972 | E_{1b}E₂E₃ | EᵥEᵥᵢ | E₄* | E_{f} |
| 1973 | E₁ₐE₂Eᵢ | EᵥEᵥᵢ | E₄* | E_{f} |
| 1974 | E_{1b}E₂Eᵢ | EᵥEᵥᵢ | E₄* | E_{f} |
| 1975 | E₁ₐE₂Eᵢᵢ | EᵥEᵥᵢ | E₄* | E_{f} |
| 1976 | E_{1b}E₂Eᵢᵢ | EᵥEᵥᵢ | E₄* | E_{f} |
| 1977 | E₁ₐE₂EᵢᵢE_{iib} | EᵥEᵥᵢ | E₄* | E_{f} |
| 1978 | E_{1b}E₂EᵢᵢE_{iib} | EᵥEᵥᵢ | E₄* | E_{f} |
| 1979 | E₁ₐE₂E₃Eᵢ | EᵥEᵥᵢ | E₄* | E_{f} |
| 1980 | E_{1b}E₂E₃Eᵢ | EᵥEᵥᵢ | E₄* | E_{f} |
| 1981 | E₁ₐE₂E₃Eᵢᵢ | EᵥEᵥᵢ | E₄* | E_{f} |
| 1982 | E_{1b}E₂E₃Eᵢᵢ | EᵥEᵥᵢ | E₄* | E_{f} |
| 1983 | E₁ₐE₂E₃EᵢᵢE_{iib} | EᵥEᵥᵢ | E₄* | E_{f} |
| 1984 | E_{1b}E₂E₃EᵢᵢE_{iib} | EᵥEᵥᵢ | E₄* | E_{f} |
| 1985 | E₁ₐE₂E₄ | EᵥEᵥᵢ | E₄* | E_{f} |
| 1986 | E_{1b}E₂E₄ | EᵥEᵥᵢ | E₄* | E_{f} |
| 1987 | E₁ₐE₂E₃E₄ | EᵥEᵥᵢ | E₄* | E_{f} |
| 1988 | E_{1b}E₂E₃E₄ | EᵥEᵥᵢ | E₄* | E_{f} |
| 1989 | E₁ₐE₂EᵢE₄ | EᵥEᵥᵢ | E₄* | E_{f} |
| 1990 | E_{1b}E₂EᵢE₄ | EᵥEᵥᵢ | E₄* | E_{f} |
| 1991 | E₁ₐE₂EᵢᵢE₄ | EᵥEᵥᵢ | E₄* | E_{f} |
| 1992 | E_{1b}E₂EᵢᵢE₄ | EᵥEᵥᵢ | E₄* | E_{f} |
| 1993 | E₁ₐE₂EᵢᵢE_{iib}E₄ | EᵥEᵥᵢ | E₄* | E_{f} |
| 1994 | E_{1b}E₂EᵢᵢE_{iib}E₄ | EᵥEᵥᵢ | E₄* | E_{f} |
| 1995 | E₁ₐE₂E₃EᵢE₄ | EᵥEᵥᵢ | E₄* | E_{f} |
| 1996 | E_{1b}E₂E₃EᵢE₄ | EᵥEᵥᵢ | E₄* | E_{f} |
| 1997 | E₁ₐE₂E₃EᵢᵢE₄ | EᵥEᵥᵢ | E₄* | E_{f} |
| 1998 | E_{1b}E₂E₃EᵢᵢE₄ | EᵥEᵥᵢ | E₄* | E_{f} |
| 1999 | E₁ₐE₂E₃EᵢᵢE_{iib}E₄ | EᵥEᵥᵢ | E₄* | E_{f} |
| 2000 | E_{1b}E₂E₃EᵢᵢE_{iib}E₄ | EᵥEᵥᵢ | E₄* | E_{f} |
| 2001 | E₁ₐE₂Eᵢᵢᵢ | EᵥEᵥᵢ | E₄* | E_{f} |
| 2002 | E_{1b}E₂Eᵢᵢᵢ | EᵥEᵥᵢ | E₄* | E_{f} |
| 2003 | E₁ₐE₂E₃Eᵢᵢᵢ | EᵥEᵥᵢ | E₄* | E_{f} |
| 2004 | E_{1b}E₂E₃Eᵢᵢᵢ | EᵥEᵥᵢ | E₄* | E_{f} |
| 2005 | E₁ₐE₂EᵢᵢᵢE₄ | EᵥEᵥᵢ | E₄* | E_{f} |
| 2006 | E_{1b}E₂EᵢᵢᵢE₄ | EᵥEᵥᵢ | E₄* | E_{f} |
| 2007 | E₁ₐE₂E₃EᵢᵢᵢE₄ | EᵥEᵥᵢ | E₄* | E_{f} |
| 2008 | E_{1b}E₂E₃EᵢᵢᵢE₄ | EᵥEᵥᵢ | E₄* | E_{f} |
| 2009 | E₁ₐE₂Eᵢᵥ | EᵥEᵥᵢ | E₄* | E_{f} |
| 2010 | E_{1b}E₂Eᵢᵥ | EᵥEᵥᵢ | E₄* | E_{f} |
| 2011 | E₁ₐE₂E₃Eᵢᵥ | EᵥEᵥᵢ | E₄* | E_{f} |
| 2012 | E_{1b}E₂E₃Eᵢᵥ | EᵥEᵥᵢ | E₄* | E_{f} |
| 2013 | E₁ₐE₂EᵢᵥE₄ | EᵥEᵥᵢ | E₄* | E_{f} |
| 2014 | E_{1b}E₂EᵢᵥE₄ | EᵥEᵥᵢ | E₄* | E_{f} |
| 2015 | E₁ₐE₂E₃EᵢᵥE₄ | EᵥEᵥᵢ | E₄* | E_{f} |
| 2016 | E_{1b}E₂E₃EᵢᵥE₄ | EᵥEᵥᵢ | E₄* | E_{f} |
| 2017 | E₁ₐE₂ | EᵥEᵥᵢ | E₅ | E_{f} |
| 2018 | E_{1b}E₂ | EᵥEᵥᵢ | E₅ | E_{f} |
| 2019 | E₁ₐE₂E₃ | EᵥEᵥᵢ | E₅ | E_{f} |
| 2020 | E_{1b}E₂E₃ | EᵥEᵥᵢ | E₅ | E_{f} |
| 2021 | E₁ₐE₂Eᵢ | EᵥEᵥᵢ | E₅ | E_{f} |
| 2022 | E_{1b}E₂Eᵢ | EᵥEᵥᵢ | E₅ | E_{f} |
| 2023 | E₁ₐE₂Eᵢᵢ | EᵥEᵥᵢ | E₅ | E_{f} |
| 2024 | E_{1b}E₂Eᵢᵢ | EᵥEᵥᵢ | E₅ | E_{f} |
| 2025 | E₁ₐE₂EᵢᵢE_{iib} | EᵥEᵥᵢ | E₅ | E_{f} |
| 2026 | E_{1b}E₂EᵢᵢE_{iib} | EᵥEᵥᵢ | E₅ | E_{f} |
| 2027 | E₁ₐE₂E₃Eᵢ | EᵥEᵥᵢ | E₅ | E_{f} |
| 2028 | E_{1b}E₂E₃Eᵢ | EᵥEᵥᵢ | E₅ | E_{f} |
| 2029 | E₁ₐE₂E₃Eᵢᵢ | EᵥEᵥᵢ | E₅ | E_{f} |
| 2030 | E_{1b}E₂E₃Eᵢᵢ | EᵥEᵥᵢ | E₅ | E_{f} |
| 2031 | E₁ₐE₂E₃EᵢᵢE_{iib} | EᵥEᵥᵢ | E₅ | E_{f} |
| 2032 | E_{1b}E₂E₃EᵢᵢE_{iib} | EᵥEᵥᵢ | E₅ | E_{f} |
| 2033 | E₁ₐE₂E₄ | EᵥEᵥᵢ | E₅ | E_{f} |
| 2034 | E_{1b}E₂E₄ | EᵥEᵥᵢ | E₅ | E_{f} |
| 2035 | E₁ₐE₂E₃E₄ | EᵥEᵥᵢ | E₅ | E_{f} |
| 2036 | E_{1b}E₂E₃E₄ | EᵥEᵥᵢ | E₅ | E_{f} |
| 2037 | E₁ₐE₂EᵢE₄ | EᵥEᵥᵢ | E₅ | E_{f} |
| 2038 | E_{1b}E₂EᵢE₄ | EᵥEᵥᵢ | E₅ | E_{f} |
| 2039 | E₁ₐE₂EᵢᵢE₄ | EᵥEᵥᵢ | E₅ | E_{f} |
| 2040 | E_{1b}E₂EᵢᵢE₄ | EᵥEᵥᵢ | E₅ | E_{f} |
| 2041 | E₁ₐE₂EᵢᵢE_{iib}E₄ | EᵥEᵥᵢ | E₅ | E_{f} |
| 2042 | E_{1b}E₂EᵢᵢE_{iib}E₄ | EᵥEᵥᵢ | E₅ | E_{f} |
| 2043 | E₁ₐE₂E₃EᵢE₄ | EᵥEᵥᵢ | E₅ | E_{f} |
| 2044 | E_{1b}E₂E₃EᵢE₄ | EᵥEᵥᵢ | E₅ | E_{f} |
| 2045 | E₁ₐE₂E₃EᵢᵢE₄ | EᵥEᵥᵢ | E₅ | E_{f} |
| 2046 | E_{1b}E₂E₃EᵢᵢE₄ | EᵥEᵥᵢ | E₅ | E_{f} |
| 2047 | E₁ₐE₂E₃EᵢᵢE_{iib}E₄ | EᵥEᵥᵢ | E₅ | E_{f} |
| 2048 | E_{1b}E₂E₃EᵢᵢE_{iib}E₄ | EᵥEᵥᵢ | E₅ | E_{f} |
| 2049 | E₁ₐE₂Eᵢᵢᵢ | EᵥEᵥᵢ | E₅ | E_{f} |
| 2050 | E_{1b}E₂Eᵢᵢᵢ | EᵥEᵥᵢ | E₅ | E_{f} |
| 2051 | E₁ₐE₂E₃Eᵢᵢᵢ | EᵥEᵥᵢ | E₅ | E_{f} |
| 2052 | E_{1b}E₂E₃Eᵢᵢᵢ | EᵥEᵥᵢ | E₅ | E_{f} |
| 2053 | E₁ₐE₂EᵢᵢᵢE₄ | EᵥEᵥᵢ | E₅ | E_{f} |
| 2054 | E_{1b}E₂EᵢᵢᵢE₄ | EᵥEᵥᵢ | E₅ | E_{f} |
| 2055 | E₁ₐE₂E₃EᵢᵢᵢE₄ | EᵥEᵥᵢ | E₅ | E_{f} |
| 2056 | E_{1b}E₂E₃EᵢᵢᵢE₄ | EᵥEᵥᵢ | E₅ | E_{f} |
| 2057 | E₁ₐE₂Eᵢᵥ | EᵥEᵥᵢ | E₅ | E_{f} |
| 2058 | E_{1b}E₂Eᵢᵥ | EᵥEᵥᵢ | E₅ | E_{f} |
| 2059 | E₁ₐE₂E₃Eᵢᵥ | EᵥEᵥᵢ | E₅ | E_{f} |
| 2060 | E_{1b}E₂E₃Eᵢᵥ | EᵥEᵥᵢ | E₅ | E_{f} |
| 2061 | E₁ₐE₂EᵢᵥE₄ | EᵥEᵥᵢ | E₅ | E_{f} |
| 2062 | E_{1b}E₂EᵢᵥE₄ | EᵥEᵥᵢ | E₅ | E_{f} |
| 2063 | E₁ₐE₂E₃EᵢᵥE₄ | EᵥEᵥᵢ | E₅ | E_{f} |
| 2064 | E_{1b}E₂E₃EᵢᵥE₄ | EᵥEᵥᵢ | E₅ | E_{f} |
| 2065 | E₁ₐE₂ | EᵥEᵥᵢ | E₄*E₅ | E_{f} |
| 2066 | E_{1b}E₂ | EᵥEᵥᵢ | E₄*E₅ | E_{f} |
| 2067 | E₁ₐE₂E₃ | EᵥEᵥᵢ | E₄*E₅ | E_{f} |
| 2068 | E_{1b}E₂E₃ | EᵥEᵥᵢ | E₄*E₅ | E_{f} |
| 2069 | E₁ₐE₂Eᵢ | EᵥEᵥᵢ | E₄*E₅ | E_{f} |
| 2070 | E_{1b}E₂Eᵢ | EᵥEᵥᵢ | E₄*E₅ | E_{f} |
| 2071 | E₁ₐE₂Eᵢᵢ | EᵥEᵥᵢ | E₄*E₅ | E_{f} |
| 2072 | E_{1b}E₂Eᵢᵢ | EᵥEᵥᵢ | E₄*E₅ | E_{f} |
| 2073 | E₁ₐE₂EᵢᵢE_{iib} | EᵥEᵥᵢ | E₄*E₅ | E_{f} |
| 2074 | E_{1b}E₂EᵢᵢE_{iib} | EᵥEᵥᵢ | E₄*E₅ | E_{f} |
| 2075 | E₁ₐE₂E₃Eᵢ | EᵥEᵥᵢ | E₄*E₅ | E_{f} |
| 2076 | E_{1b}E₂E₃Eᵢ | EᵥEᵥᵢ | E₄*E₅ | E_{f} |
| 2077 | E₁ₐE₂E₃Eᵢᵢ | EᵥEᵥᵢ | E₄*E₅ | E_{f} |
| 2078 | E_{1b}E₂E₃Eᵢᵢ | EᵥEᵥᵢ | E₄*E₅ | E_{f} |
| 2079 | E₁ₐE₂E₃EᵢᵢE_{iib} | EᵥEᵥᵢ | E₄*E₅ | E_{f} |
| 2080 | E_{1b}E₂E₃EᵢᵢE_{iib} | EᵥEᵥᵢ | E₄*E₅ | E_{f} |
| 2081 | E₁ₐE₂E₄ | EᵥEᵥᵢ | E₄*E₅ | E_{f} |
| 2082 | E_{1b}E₂E₄ | EᵥEᵥᵢ | E₄*E₅ | E_{f} |
| 2083 | E₁ₐE₂E₃E₄ | EᵥEᵥᵢ | E₄*E₅ | E_{f} |
| 2084 | E_{1b}E₂E₃E₄ | EᵥEᵥᵢ | E₄*E₅ | E_{f} |
| 2085 | E₁ₐE₂EᵢE₄ | EᵥEᵥᵢ | E₄*E₅ | E_{f} |
| 2086 | E_{1b}E₂EᵢE₄ | EᵥEᵥᵢ | E₄*E₅ | E_{f} |
| 2087 | E₁ₐE₂EᵢᵢE₄ | EᵥEᵥᵢ | E₄*E₅ | E_{f} |
| 2088 | E_{1b}E₂EᵢᵢE₄ | EᵥEᵥᵢ | E₄*E₅ | E_{f} |
| 2089 | E₁ₐE₂EᵢᵢE_{iib}E₄ | EᵥEᵥᵢ | E₄*E₅ | E_{f} |
| 2090 | E_{1b}E₂EᵢᵢE_{iib}E₄ | EᵥEᵥᵢ | E₄*E₅ | E_{f} |
| 2091 | E₁ₐE₂E₃EᵢE₄ | EᵥEᵥᵢ | E₄*E₅ | E_{f} |
| 2092 | E_{1b}E₂E₃EᵢE₄ | EᵥEᵥᵢ | E₄*E₅ | E_{f} |
| 2093 | E₁ₐE₂E₃EᵢᵢE₄ | EᵥEᵥᵢ | E₄*E₅ | E_{f} |
| 2094 | E_{1b}E₂E₃EᵢᵢE₄ | EᵥEᵥᵢ | E₄*E₅ | E_{f} |
| 2095 | E₁ₐE₂E₃EᵢᵢE_{iib}E₄ | EᵥEᵥᵢ | E₄*E₅ | E_{f} |
| 2096 | E_{1b}E₂E₃EᵢᵢE_{iib}E₄ | EᵥEᵥᵢ | E₄*E₅ | E_{f} |
| 2097 | E₁ₐE₂Eᵢᵢᵢ | EᵥEᵥᵢ | E₄*E₅ | E_{f} |
| 2098 | E_{1b}E₂Eᵢᵢᵢ | EᵥEᵥᵢ | E₄*E₅ | E_{f} |
| 2099 | E₁ₐE₂E₃Eᵢᵢᵢ | EᵥEᵥᵢ | E₄*E₅ | E_{f} |
| 2100 | E_{1b}E₂E₃Eᵢᵢᵢ | EᵥEᵥᵢ | E₄*E₅ | E_{f} |
| 2101 | E₁ₐE₂EᵢᵢᵢE₄ | EᵥEᵥᵢ | E₄*E₅ | E_{f} |
| 2102 | E_{1b}E₂EᵢᵢᵢE₄ | EᵥEᵥᵢ | E₄*E₅ | E_{f} |
| 2103 | E₁ₐE₂E₃EᵢᵢᵢE₄ | EᵥEᵥᵢ | E₄*E₅ | E_{f} |
| 2104 | E_{1b}E₂E₃EᵢᵢᵢE₄ | EᵥEᵥᵢ | E₄*E₅ | E_{f} |
| 2105 | E₁ₐE₂Eᵢᵥ | EᵥEᵥᵢ | E₄*E₅ | E_{f} |
| 2106 | E_{1b}E₂Eᵢᵥ | EᵥEᵥᵢ | E₄*E₅ | E_{f} |
| 2107 | E₁ₐE₂E₃Eᵢᵥ | EᵥEᵥᵢ | E₄*E₅ | E_{f} |
| 2108 | E_{1b}E₂E₃Eᵢᵥ | EᵥEᵥᵢ | E₄*E₅ | E_{f} |
| 2109 | E₁ₐE₂EᵢᵥE₄ | EᵥEᵥᵢ | E₄*E₅ | E_{f} |
| 2110 | E_{1b}E₂EᵢᵥE₄ | EᵥEᵥᵢ | E₄*E₅ | E_{f} |
| 2111 | E₁ₐE₂E₃EᵢᵥE₄ | EᵥEᵥᵢ | E₄*E₅ | E_{f} |
| 2112 | E_{1b}E₂E₃EᵢᵥE₄ | EᵥEᵥᵢ | E₄*E₅ | E_{f} |
| 2113 | E₁ₐE₂ | AlkLEᵥEᵥᵢ | | E_{f} |
| 2114 | E_{1b}E₂ | AlkLEᵥEᵥᵢ | | E_{f} |
| 2115 | E₁ₐE₂E₃ | AlkLEᵥEᵥᵢ | | E_{f} |
| 2116 | E_{1b}E₂E₃ | AlkLEᵥEᵥᵢ | | E_{f} |
| 2117 | E₁ₐE₂Eᵢ | AlkLEᵥEᵥᵢ | | E_{f} |
| 2118 | E_{1b}E₂Eᵢ | AlkLEᵥEᵥᵢ | | E_{f} |
| 2119 | E₁ₐE₂Eᵢᵢ | AlkLEᵥEᵥᵢ | | E_{f} |
| 2120 | E_{1b}E₂Eᵢᵢ | AlkLEᵥEᵥᵢ | | E_{f} |
| 2121 | E₁ₐE₂EᵢᵢE_{iib} | AlkLEᵥEᵥᵢ | | E_{f} |
| 2122 | E_{1b}E₂EᵢᵢE_{iib} | AlkLEᵥEᵥᵢ | | E_{f} |
| 2123 | E₁ₐE₂E₃Eᵢ | AlkLEᵥEᵥᵢ | | E_{f} |
| 2124 | E_{1b}E₂E₃Eᵢ | AlkLEᵥEᵥᵢ | | E_{f} |
| 2125 | E₁ₐE₂E₃Eᵢᵢ | AlkLEᵥEᵥᵢ | | E_{f} |
| 2126 | E_{1b}E₂E₃Eᵢᵢ | AlkLEᵥEᵥᵢ | | E_{f} |
| 2127 | E₁ₐE₂E₃EᵢᵢE_{iib} | AlkLEᵥEᵥᵢ | | E_{f} |
| 2128 | E_{1b}E₂E₃EᵢᵢE_{iib} | AlkLEᵥEᵥᵢ | | E_{f} |
| 2129 | E₁ₐE₂E₄ | AlkLEᵥEᵥᵢ | | E_{f} |
| 2130 | E_{1b}E₂E₄ | AlkLEᵥEᵥᵢ | | E_{f} |
| 2131 | E₁ₐE₂E₃E₄ | AlkLEᵥEᵥᵢ | | E_{f} |
| 2132 | E_{1b}E₂E₃E₄ | AlkLEᵥEᵥᵢ | | E_{f} |
| 2133 | E₁ₐE₂EᵢE₄ | AlkLEᵥEᵥᵢ | | E_{f} |
| 2134 | E_{1b}E₂EᵢE₄ | AlkLEᵥEᵥᵢ | | E_{f} |
| 2135 | E₁ₐE₂EᵢᵢE₄ | AlkLEᵥEᵥᵢ | | E_{f} |
| 2136 | E_{1b}E₂EᵢᵢE₄ | AlkLEᵥEᵥᵢ | | E_{f} |
| 2137 | E₁ₐE₂EᵢᵢE_{iib}E₄ | AlkLEᵥEᵥᵢ | | E_{f} |
| 2138 | E_{1b}E₂EᵢᵢE_{iib}E₄ | AlkLEᵥEᵥᵢ | | E_{f} |
| 2139 | E₁ₐE₂E₃EᵢE₄ | AlkLEᵥEᵥᵢ | | E_{f} |
| 2140 | E_{1b}E₂E₃EᵢE₄ | AlkLEᵥEᵥᵢ | | E_{f} |
| 2141 | E₁ₐE₂E₃EᵢᵢE₄ | AlkLEᵥEᵥᵢ | | E_{f} |
| 2142 | E_{1b}E₂E₃EᵢᵢE₄ | AlkLEᵥEᵥᵢ | | E_{f} |
| 2143 | E₁ₐE₂E₃EᵢᵢE_{iib}E₄ | AlkLEᵥEᵥᵢ | | E_{f} |
| 2144 | E_{1b}E₂E₃EᵢᵢE_{iib}E₄ | AlkLEᵥEᵥᵢ | | E_{f} |
| 2145 | E₁ₐE₂Eᵢᵢᵢ | AlkLEᵥEᵥᵢ | | E_{f} |
| 2146 | E_{1b}E₂Eᵢᵢᵢ | AlkLEᵥEᵥᵢ | | E_{f} |
| 2147 | E₁ₐE₂E₃Eᵢᵢᵢ | AlkLEᵥEᵥᵢ | | E_{f} |
| 2148 | E_{1b}E₂E₃Eᵢᵢᵢ | AlkLEᵥEᵥᵢ | | E_{f} |
| 2149 | E₁ₐE₂EᵢᵢᵢE₄ | AlkLEᵥEᵥᵢ | | E_{f} |
| 2150 | E_{1b}E₂EᵢᵢᵢE₄ | AlkLEᵥEᵥᵢ | | E_{f} |
| 2151 | E₁ₐE₂E₃EᵢᵢᵢE₄ | AlkLEᵥEᵥᵢ | | E_{f} |
| 2152 | E_{1b}E₂E₃EᵢᵢᵢE₄ | AlkLEᵥEᵥᵢ | | E_{f} |
| 2153 | E₁ₐE₂Eᵢᵥ | AlkLEᵥEᵥᵢ | | E_{f} |
| 2154 | E_{1b}E₂Eᵢᵥ | AlkLEᵥEᵥᵢ | | E_{f} |
| 2155 | E₁ₐE₂E₃Eᵢᵥ | AlkLEᵥEᵥᵢ | | E_{f} |
| 2156 | E_{1b}E₂E₃Eᵢᵥ | AlkLEᵥEᵥᵢ | | E_{f} |
| 2157 | E₁ₐE₂EᵢᵥE₄ | AlkLEᵥEᵥᵢ | | E_{f} |
| 2158 | E_{1b}E₂EᵢᵥE₄ | AlkLEᵥEᵥᵢ | | E_{f} |
| 2159 | E₁ₐE₂E₃EᵢᵥE₄ | AlkLEᵥEᵥᵢ | | E_{f} |
| 2160 | E_{1b}E₂E₃EᵢᵥE₄ | AlkLEᵥEᵥᵢ | | E_{f} |
| 2161 | E₁ₐE₂ | AlkLEᵥEᵥᵢ | E₄* | E_{f} |
| 2162 | E_{1b}E₂ | AlkLEᵥEᵥᵢ | E₄* | E_{f} |
| 2163 | E₁ₐE₂E₃ | AlkLEᵥEᵥᵢ | E₄* | E_{f} |
| 2164 | E_{1b}E₂E₃ | AlkLEᵥEᵥᵢ | E₄* | E_{f} |
| 2165 | E₁ₐE₂Eᵢ | AlkLEᵥEᵥᵢ | E₄* | E_{f} |
| 2166 | E_{1b}E₂Eᵢ | AlkLEᵥEᵥᵢ | E₄* | E_{f} |
| 2167 | E₁ₐE₂Eᵢᵢ | AlkLEᵥEᵥᵢ | E₄* | E_{f} |
| 2168 | E_{1b}E₂Eᵢᵢ | AlkLEᵥEᵥᵢ | E₄* | E_{f} |
| 2169 | E₁ₐE₂EᵢᵢE_{iib} | AlkLEᵥEᵥᵢ | E₄* | E_{f} |
| 2170 | E_{1b}E₂EᵢᵢE_{iib} | AlkLEᵥEᵥᵢ | E₄* | E_{f} |
| 2171 | E₁ₐE₂E₃Eᵢ | AlkLEᵥEᵥᵢ | E₄* | E_{f} |
| 2172 | E_{1b}E₂E₃Eᵢ | AlkLEᵥEᵥᵢ | E₄* | E_{f} |
| 2173 | E₁ₐE₂E₃Eᵢᵢ | AlkLEᵥEᵥᵢ | E₄* | E_{f} |
| 2174 | E_{1b}E₂E₃Eᵢᵢ | AlkLEᵥEᵥᵢ | E₄* | E_{f} |
| 2175 | E₁ₐE₂E₃EᵢᵢE_{iib} | AlkLEᵥEᵥᵢ | E₄* | E_{f} |
| 2176 | E_{1b}E₂E₃EᵢᵢE_{iib} | AlkLEᵥEᵥᵢ | E₄* | E_{f} |
| 2177 | E₁ₐE₂E₄ | AlkLEᵥEᵥᵢ | E₄* | E_{f} |
| 2178 | E_{1b}E₂E₄ | AlkLEᵥEᵥᵢ | E₄* | E_{f} |
| 2179 | E₁ₐE₂E₃E₄ | AlkLEᵥEᵥᵢ | E₄* | E_{f} |
| 2180 | E_{1b}E₂E₃E₄ | AlkLEᵥEᵥᵢ | E₄* | E_{f} |
| 2181 | E₁ₐE₂EᵢE₄ | AlkLEᵥEᵥᵢ | E₄* | E_{f} |
| 2182 | E_{1b}E₂EᵢE₄ | AlkLEᵥEᵥᵢ | E₄* | E_{f} |
| 2183 | E₁ₐE₂EᵢᵢE₄ | AlkLEᵥEᵥᵢ | E₄* | E_{f} |
| 2184 | E_{1b}E₂EᵢᵢE₄ | AlkLEᵥEᵥᵢ | E₄* | E_{f} |
| 2185 | E₁ₐE₂EᵢᵢE_{iib}E₄ | AlkLEᵥEᵥᵢ | E₄* | E_{f} |
| 2186 | E_{1b}E₂EᵢᵢE_{iib}E₄ | AlkLEᵥEᵥᵢ | E₄* | E_{f} |
| 2187 | E₁ₐE₂E₃EᵢE₄ | AlkLEᵥEᵥᵢ | E₄* | E_{f} |
| 2188 | E_{1b}E₂E₃EᵢE₄ | AlkLEᵥEᵥᵢ | E₄* | E_{f} |
| 2189 | E₁ₐE₂E₃EᵢᵢE₄ | AlkLEᵥEᵥᵢ | E₄* | E_{f} |
| 2190 | E_{1b}E₂E₃EᵢᵢE₄ | AlkLEᵥEᵥᵢ | E₄* | E_{f} |
| 2191 | E₁ₐE₂E₃EᵢᵢE_{iib}E₄ | AlkLEᵥEᵥᵢ | E₄* | E_{f} |
| 2192 | E_{1b}E₂E₃EᵢᵢE_{iib}E₄ | AlkLEᵥEᵥᵢ | E₄* | E_{f} |
| 2193 | E₁ₐE₂Eᵢᵢᵢ | AlkLEᵥEᵥᵢ | E₄* | E_{f} |
| 2194 | E_{1b}E₂Eᵢᵢᵢ | AlkLEᵥEᵥᵢ | E₄* | E_{f} |
| 2195 | E₁ₐE₂E₃Eᵢᵢᵢ | AlkLEᵥEᵥᵢ | E₄* | E_{f} |
| 2196 | E_{1b}E₂E₃Eᵢᵢᵢ | AlkLEᵥEᵥᵢ | E₄* | E_{f} |
| 2197 | E₁ₐE₂EᵢᵢᵢE₄ | AlkLEᵥEᵥᵢ | E₄* | E_{f} |
| 2198 | E_{1b}E₂EᵢᵢᵢE₄ | AlkLEᵥEᵥᵢ | E₄* | E_{f} |
| 2199 | E₁ₐE₂E₃EᵢᵢᵢE₄ | AlkLEᵥEᵥᵢ | E₄* | E_{f} |
| 2200 | E_{1b}E₂E₃EᵢᵢᵢE₄ | AlkLEᵥEᵥᵢ | E₄* | E_{f} |
| 2201 | E₁ₐE₂Eᵢᵥ | AlkLEᵥEᵥᵢ | E₄* | E_{f} |
| 2202 | E_{1b}E₂Eᵢᵥ | AlkLEᵥEᵥᵢ | E₄* | E_{f} |
| 2203 | E₁ₐE₂E₃Eᵢᵥ | AlkLEᵥEᵥᵢ | E₄* | E_{f} |
| 2204 | E_{1b}E₂E₃Eᵢᵥ | AlkLEᵥEᵥᵢ | E₄* | E_{f} |
| 2205 | E₁ₐE₂EᵢᵥE₄ | AlkLEᵥEᵥᵢ | E₄* | E_{f} |
| 2206 | E_{1b}E₂EᵢᵥE₄ | AlkLEᵥEᵥᵢ | E₄* | E_{f} |
| 2207 | E₁ₐE₂E₃EᵢᵥE₄ | AlkLEᵥEᵥᵢ | E₄* | E_{f} |
| 2208 | E_{1b}E₂E₃EᵢᵥE₄ | AlkLEᵥEᵥᵢ | E₄* | E_{f} |
| 2209 | E₁ₐE₂ | AlkLEᵥEᵥᵢ | E₅ | E_{f} |
| 2210 | E_{1b}E₂ | AlkLEᵥEᵥᵢ | E₅ | E_{f} |
| 2211 | E₁ₐE₂E₃ | AlkLEᵥEᵥᵢ | E₅ | E_{f} |
| 2212 | E_{1b}E₂E₃ | AlkLEᵥEᵥᵢ | E₅ | E_{f} |
| 2213 | E₁ₐE₂Eᵢ | AlkLEᵥEᵥᵢ | E₅ | E_{f} |
| 2214 | E_{1b}E₂Eᵢ | AlkLEᵥEᵥᵢ | E₅ | E_{f} |
| 2215 | E₁ₐE₂Eᵢᵢ | AlkLEᵥEᵥᵢ | E₅ | E_{f} |
| 2216 | E_{1b}E₂Eᵢᵢ | AlkLEᵥEᵥᵢ | E₅ | E_{f} |
| 2217 | E₁ₐE₂EᵢᵢE_{iib} | AlkLEᵥEᵥᵢ | E₅ | E_{f} |
| 2218 | E_{1b}E₂EᵢᵢE_{iib} | AlkLEᵥEᵥᵢ | E₅ | E_{f} |
| 2219 | E₁ₐE₂E₃Eᵢ | AlkLEᵥEᵥᵢ | E₅ | E_{f} |
| 2220 | E_{1b}E₂E₃Eᵢ | AlkLEᵥEᵥᵢ | E₅ | E_{f} |
| 2221 | E₁ₐE₂E₃Eᵢᵢ | AlkLEᵥEᵥᵢ | E₅ | E_{f} |
| 2222 | E_{1b}E₂E₃Eᵢᵢ | AlkLEᵥEᵥᵢ | E₅ | E_{f} |
| 2223 | E₁ₐE₂E₃EᵢᵢE_{iib} | AlkLEᵥEᵥᵢ | E₅ | E_{f} |
| 2224 | E_{1b}E₂E₃EᵢᵢE_{iib} | AlkLEᵥEᵥᵢ | E₅ | E_{f} |
| 2225 | E₁ₐE₂E₄ | AlkLEᵥEᵥᵢ | E₅ | E_{f} |
| 2226 | E_{1b}E₂E₄ | AlkLEᵥEᵥᵢ | E₅ | E_{f} |
| 2227 | E₁ₐE₂E₃E₄ | AlkLEᵥEᵥᵢ | E₅ | E_{f} |
| 2228 | E_{1b}E₂E₃E₄ | AlkLEᵥEᵥᵢ | E₅ | E_{f} |
| 2229 | E₁ₐE₂EᵢE₄ | AlkLEᵥEᵥᵢ | E₅ | E_{f} |
| 2230 | E_{1b}E₂EᵢE₄ | AlkLEᵥEᵥᵢ | E₅ | E_{f} |
| 2231 | E₁ₐE₂EᵢᵢE₄ | AlkLEᵥEᵥᵢ | E₅ | E_{f} |
| 2232 | E_{1b}E₂EᵢᵢE₄ | AlkLEᵥEᵥᵢ | E₅ | E_{f} |
| 2233 | E₁ₐE₂EᵢᵢE_{iib}E₄ | AlkLEᵥEᵥᵢ | E₅ | E_{f} |
| 2234 | E_{1b}E₂EᵢᵢE_{iib}E₄ | AlkLEᵥEᵥᵢ | E₅ | E_{f} |
| 2235 | E₁ₐE₂E₃EᵢE₄ | AlkLEᵥEᵥᵢ | E₅ | E_{f} |
| 2236 | E_{1b}E₂E₃EᵢE₄ | AlkLEᵥEᵥᵢ | E₅ | E_{f} |
| 2237 | E₁ₐE₂E₃EᵢᵢE₄ | AlkLEᵥEᵥᵢ | E₅ | E_{f} |
| 2238 | E_{1b}E₂E₃EᵢᵢE₄ | AlkLEᵥEᵥᵢ | E₅ | E_{f} |
| 2239 | E₁ₐE₂E₃EᵢᵢE_{iib}E₄ | AlkLEᵥEᵥᵢ | E₅ | E_{f} |
| 2240 | E_{1b}E₂E₃EᵢᵢE_{iib}E₄ | AlkLEᵥEᵥᵢ | E₅ | E_{f} |
| 2241 | E₁ₐE₂Eᵢᵢᵢ | AlkLEᵥEᵥᵢ | E₅ | E_{f} |
| 2242 | E_{1b}E₂Eᵢᵢᵢ | AlkLEᵥEᵥᵢ | E₅ | E_{f} |
| 2243 | E₁ₐE₂E₃Eᵢᵢᵢ | AlkLEᵥEᵥᵢ | E₅ | E_{f} |
| 2244 | E_{1b}E₂E₃Eᵢᵢᵢ | AlkLEᵥEᵥᵢ | E₅ | E_{f} |
| 2245 | E₁ₐE₂EᵢᵢᵢE₄ | AlkLEᵥEᵥᵢ | E₅ | E_{f} |
| 2246 | E_{1b}E₂EᵢᵢᵢE₄ | AlkLEᵥEᵥᵢ | E₅ | E_{f} |
| 2247 | E₁ₐE₂E₃EᵢᵢᵢE₄ | AlkLEᵥEᵥᵢ | E₅ | E_{f} |
| 2248 | E_{1b}E₂E₃EᵢᵢᵢE₄ | AlkLEᵥEᵥᵢ | E₅ | E_{f} |
| 2249 | E₁ₐE₂Eᵢᵥ | AlkLEᵥEᵥᵢ | E₅ | E_{f} |
| 2250 | E_{1b}E₂Eᵢᵥ | AlkLEᵥEᵥᵢ | E₅ | E_{f} |
| 2251 | E₁ₐE₂E₃Eᵢᵥ | AlkLEᵥEᵥᵢ | E₅ | E_{f} |
| 2252 | E_{1b}E₂E₃Eᵢᵥ | AlkLEᵥEᵥᵢ | E₅ | E_{f} |
| 2253 | E₁ₐE₂EᵢᵥE₄ | AlkLEᵥEᵥᵢ | E₅ | E_{f} |
| 2254 | E_{1b}E₂EᵢᵥE₄ | AlkLEᵥEᵥᵢ | E₅ | E_{f} |
| 2255 | E₁ₐE₂E₃EᵢᵥE₄ | AlkLEᵥEᵥᵢ | E₅ | E_{f} |
| 2256 | E_{1b}E₂E₃EᵢᵥE₄ | AlkLEᵥEᵥᵢ | E₅ | E_{f} |
| 2257 | E₁ₐE₂ | AlkLEᵥEᵥᵢ | E₄*E₅ | E_{f} |
| 2258 | E_{1b}E₂ | AlkLEᵥEᵥᵢ | E₄*E₅ | E_{f} |
| 2259 | E₁ₐE₂E₃ | AlkLEᵥEᵥᵢ | E₄*E₅ | E_{f} |
| 2260 | E_{1b}E₂E₃ | AlkLEᵥEᵥᵢ | E₄*E₅ | E_{f} |
| 2261 | E₁ₐE₂Eᵢ | AlkLEᵥEᵥᵢ | E₄*E₅ | E_{f} |
| 2262 | E_{1b}E₂Eᵢ | AlkLEᵥEᵥᵢ | E₄*E₅ | E_{f} |
| 2263 | E₁ₐE₂Eᵢᵢ | AlkLEᵥEᵥᵢ | E₄*E₅ | E_{f} |
| 2264 | E_{1b}E₂Eᵢᵢ | AlkLEᵥEᵥᵢ | E₄*E₅ | E_{f} |
| 2265 | E₁ₐE₂EᵢᵢE_{iib} | AlkLEᵥEᵥᵢ | E₄*E₅ | E_{f} |
| 2266 | E_{1b}E₂EᵢᵢE_{iib} | AlkLEᵥEᵥᵢ | E₄*E₅ | E_{f} |
| 2267 | E₁ₐE₂E₃Eᵢ | AlkLEᵥEᵥᵢ | E₄*E₅ | E_{f} |
| 2268 | E_{1b}E₂E₃Eᵢ | AlkLEᵥEᵥᵢ | E₄*E₅ | E_{f} |
| 2269 | E₁ₐE₂E₃Eᵢᵢ | AlkLEᵥEᵥᵢ | E₄*E₅ | E_{f} |
| 2270 | E_{1b}E₂E₃Eᵢᵢ | AlkLEᵥEᵥᵢ | E₄*E₅ | E_{f} |
| 2271 | E₁ₐE₂E₃EᵢᵢE_{iib} | AlkLEᵥEᵥᵢ | E₄*E₅ | E_{f} |
| 2272 | E_{1b}E₂E₃EᵢᵢE_{iib} | AlkLEᵥEᵥᵢ | E₄*E₅ | E_{f} |
| 2273 | E₁ₐE₂E₄ | AlkLEᵥEᵥᵢ | E₄*E₅ | E_{f} |
| 2274 | E_{1b}E₂E₄ | AlkLEᵥEᵥᵢ | E₄*E₅ | E_{f} |
| 2275 | E₁ₐE₂E₃E₄ | AlkLEᵥEᵥᵢ | E₄*E₅ | E_{f} |
| 2276 | E_{1b}E₂E₃E₄ | AlkLEᵥEᵥᵢ | E₄*E₅ | E_{f} |
| 2277 | E₁ₐE₂EᵢE₄ | AlkLEᵥEᵥᵢ | E₄*E₅ | E_{f} |
| 2278 | E_{1b}E₂EᵢE₄ | AlkLEᵥEᵥᵢ | E₄*E₅ | E_{f} |
| 2279 | E₁ₐE₂EᵢᵢE₄ | AlkLEᵥEᵥᵢ | E₄*E₅ | E_{f} |
| 2280 | E_{1b}E₂EᵢᵢE₄ | AlkLEᵥEᵥᵢ | E₄*E₅ | E_{f} |
| 2281 | E₁ₐE₂EᵢᵢE_{iib}E₄ | AlkLEᵥEᵥᵢ | E₄*E₅ | E_{f} |
| 2282 | E_{1b}E₂EᵢᵢE_{iib}E₄ | AlkLEᵥEᵥᵢ | E₄*E₅ | E_{f} |
| 2283 | E₁ₐE₂E₃EᵢE₄ | AlkLEᵥEᵥᵢ | E₄*E₅ | E_{f} |
| 2284 | E_{1b}E₂E₃EᵢE₄ | AlkLEᵥEᵥᵢ | E₄*E₅ | E_{f} |
| 2285 | E₁ₐE₂E₃EᵢᵢE₄ | AlkLEᵥEᵥᵢ | E₄*E₅ | E_{f} |
| 2286 | E_{1b}E₂E₃EᵢᵢE₄ | AlkLEᵥEᵥᵢ | E₄*E₅ | E_{f} |
| 2287 | E₁ₐE₂E₃EᵢᵢE_{iib}E₄ | AlkLEᵥEᵥᵢ | E₄*E₅ | E_{f} |
| 2288 | E_{1b}E₂E₃EᵢᵢE_{iib}E₄ | AlkLEᵥEᵥᵢ | E₄*E₅ | E_{f} |
| 2289 | E₁ₐE₂Eᵢᵢᵢ | AlkLEᵥEᵥᵢ | E₄*E₅ | E_{f} |
| 2290 | E_{1b}E₂Eᵢᵢᵢ | AlkLEᵥEᵥᵢ | E₄*E₅ | E_{f} |
| 2291 | E₁ₐE₂E₃Eᵢᵢᵢ | AlkLEᵥEᵥᵢ | E₄*E₅ | E_{f} |
| 2292 | E_{1b}E₂E₃Eᵢᵢᵢ | AlkLEᵥEᵥᵢ | E₄*E₅ | E_{f} |
| 2293 | E₁ₐE₂EᵢᵢᵢE₄ | AlkLEᵥEᵥᵢ | E₄*E₅ | E_{f} |
| 2294 | E_{1b}E₂EᵢᵢᵢE₄ | AlkLEᵥEᵥᵢ | E₄*E₅ | E_{f} |
| 2295 | E₁ₐE₂E₃EᵢᵢᵢE₄ | AlkLEᵥEᵥᵢ | E₄*E₅ | E_{f} |
| 2296 | E_{1b}E₂E₃EᵢᵢᵢE₄ | AlkLEᵥEᵥᵢ | E₄*E₅ | E_{f} |
| 2297 | E₁ₐE₂Eᵢᵥ | AlkLEᵥEᵥᵢ | E₄*E₅ | E_{f} |
| 2298 | E_{1b}E₂Eᵢᵥ | AlkLEᵥEᵥᵢ | E₄*E₅ | E_{f} |
| 2299 | E₁ₐE₂E₃Eᵢᵥ | AlkLEᵥEᵥᵢ | E₄*E₅ | E_{f} |
| 2300 | E_{1b}E₂E₃Eᵢᵥ | AlkLEᵥEᵥᵢ | E₄*E₅ | E_{f} |
| 2301 | E₁ₐE₂EᵢᵥE₄ | AlkLEᵥEᵥᵢ | E₄*E₅ | E_{f} |
| 2302 | E_{1b}E₂EᵢᵥE₄ | AlkLEᵥEᵥᵢ | E₄*E₅ | E_{f} |
| 2303 | E₁ₐE₂E₃EᵢᵥE₄ | AlkLEᵥEᵥᵢ | E₄*E₅ | E_{f} |
| 2304 | E_{1b}E₂E₃EᵢᵥE₄ | AlkLEᵥEᵥᵢ | E₄*E₅ | E_{f} |
| 2305 | E₁ₐE₂ | Eᵥᵢᵢ | | |
| 2306 | E_{1b}E₂ | Eᵥᵢᵢ | | |
| 2307 | E₁ₐE₂E₃ | Eᵥᵢᵢ | | |
| 2308 | E_{1b}E₂E₃ | Eᵥᵢᵢ | | |
| 2309 | E₁ₐE₂Eᵢ | Eᵥᵢᵢ | | |
| 2310 | E_{1b}E₂Eᵢ | Eᵥᵢᵢ | | |
| 2311 | E₁ₐE₂Eᵢᵢ | Eᵥᵢᵢ | | |
| 2312 | E_{1b}E₂Eᵢᵢ | Eᵥᵢᵢ | | |
| 2313 | E₁ₐE₂EᵢᵢE_{iib} | Eᵥᵢᵢ | | |
| 2314 | E_{1b}E₂EᵢᵢE_{iib} | Eᵥᵢᵢ | | |
| 2315 | E₁ₐE₂E₃Eᵢ | Eᵥᵢᵢ | | |
| 2316 | E_{1b}E₂E₃Eᵢ | Eᵥᵢᵢ | | |
| 2317 | E₁ₐE₂E₃Eᵢᵢ | Eᵥᵢᵢ | | |
| 2318 | E_{1b}E₂E₃Eᵢᵢ | Eᵥᵢᵢ | | |
| 2319 | E₁ₐE₂E₃EᵢᵢE_{iib} | Eᵥᵢᵢ | | |
| 2320 | E_{1b}E₂E₃EᵢᵢE_{iib} | Eᵥᵢᵢ | | |
| 2321 | E₁ₐE₂E₄ | Eᵥᵢᵢ | | |
| 2322 | E_{1b}E₂E₄ | Eᵥᵢᵢ | | |
| 2323 | E₁ₐE₂E₃E₄ | Eᵥᵢᵢ | | |
| 2324 | E_{1b}E₂E₃E₄ | Eᵥᵢᵢ | | |
| 2325 | E₁ₐE₂EᵢE₄ | Eᵥᵢᵢ | | |
| 2326 | E_{1b}E₂EᵢE₄ | Eᵥᵢᵢ | | |
| 2327 | E₁ₐE₂EᵢᵢE₄ | Eᵥᵢᵢ | | |
| 2328 | E_{1b}E₂EᵢᵢE₄ | Eᵥᵢᵢ | | |
| 2329 | E₁ₐE₂EᵢᵢE_{iib}E₄ | Eᵥᵢᵢ | | |
| 2330 | E_{1b}E₂EᵢᵢE_{iib}E₄ | Eᵥᵢᵢ | | |
| 2331 | E₁ₐE₂E₃EᵢE₄ | Eᵥᵢᵢ | | |
| 2332 | E_{1b}E₂E₃EᵢE₄ | Eᵥᵢᵢ | | |
| 2333 | E₁ₐE₂E₃EᵢᵢE₄ | Eᵥᵢᵢ | | |
| 2334 | E_{1b}E₂E₃EᵢᵢE₄ | Eᵥᵢᵢ | | |
| 2335 | E₁ₐE₂E₃EᵢᵢE_{iib}E₄ | Eᵥᵢᵢ | | |
| 2336 | E_{1b}E₂E₃EᵢᵢE_{iib}E₄ | Eᵥᵢᵢ | | |
| 2337 | E₁ₐE₂Eᵢᵢᵢ | Eᵥᵢᵢ | | |
| 2338 | E_{1b}E₂Eᵢᵢᵢ | Eᵥᵢᵢ | | |
| 2339 | E₁ₐE₂E₃Eᵢᵢᵢ | Eᵥᵢᵢ | | |
| 2340 | E_{1b}E₂E₃Eᵢᵢᵢ | Eᵥᵢᵢ | | |
| 2341 | E₁ₐE₂EᵢᵢᵢE₄ | Eᵥᵢᵢ | | |
| 2342 | E_{1b}E₂EᵢᵢᵢE₄ | Eᵥᵢᵢ | | |
| 2343 | E₁ₐE₂E₃EᵢᵢᵢE₄ | Eᵥᵢᵢ | | |
| 2344 | E_{1b}E₂E₃EᵢᵢᵢE₄ | Eᵥᵢᵢ | | |
| 2345 | E₁ₐE₂Eᵢᵥ | Eᵥᵢᵢ | | |
| 2346 | E_{1b}E₂Eᵢᵥ | Eᵥᵢᵢ | | |
| 2347 | E₁ₐE₂E₃Eᵢᵥ | Eᵥᵢᵢ | | |
| 2348 | E_{1b}E₂E₃Eᵢᵥ | Eᵥᵢᵢ | | |
| 2349 | E₁ₐE₂EᵢᵥE₄ | Eᵥᵢᵢ | | |
| 2350 | E_{1b}E₂EᵢᵥE₄ | Eᵥᵢᵢ | | |
| 2351 | E₁ₐE₂E₃EᵢᵥE₄ | Eᵥᵢᵢ | | |
| 2352 | E_{1b}E₂E₃EᵢᵥE₄ | Eᵥᵢᵢ | | |
| 2353 | E₁ₐE₂ | Eᵥᵢᵢ | E₄* | |
| 2354 | E_{1b}E₂ | Eᵥᵢᵢ | E₄* | |
| 2355 | E₁ₐE₂E₃ | Eᵥᵢᵢ | E₄* | |
| 2356 | E_{1b}E₂E₃ | Eᵥᵢᵢ | E₄* | |
| 2357 | E₁ₐE₂Eᵢ | Eᵥᵢᵢ | E₄* | |
| 2358 | E_{1b}E₂Eᵢ | Eᵥᵢᵢ | E₄* | |
| 2359 | E₁ₐE₂Eᵢᵢ | Eᵥᵢᵢ | E₄* | |
| 2360 | E_{1b}E₂Eᵢᵢ | Eᵥᵢᵢ | E₄* | |
| 2361 | E₁ₐE₂EᵢᵢE_{iib} | Eᵥᵢᵢ | E₄* | |
| 2362 | E_{1b}E₂EᵢᵢE_{iib} | Eᵥᵢᵢ | E₄* | |
| 2363 | E₁ₐE₂E₃Eᵢ | Eᵥᵢᵢ | E₄* | |
| 2364 | E_{1b}E₂E₃Eᵢ | Eᵥᵢᵢ | E₄* | |
| 2365 | E₁ₐE₂E₃Eᵢᵢ | Eᵥᵢᵢ | E₄* | |
| 2366 | E_{1b}E₂E₃Eᵢᵢ | Eᵥᵢᵢ | E₄* | |
| 2367 | E₁ₐE₂E₃EᵢᵢE_{iib} | Eᵥᵢᵢ | E₄* | |
| 2368 | E_{1b}E₂E₃EᵢᵢE_{iib} | Eᵥᵢᵢ | E₄* | |
| 2369 | E₁ₐE₂E₄ | Eᵥᵢᵢ | E₄* | |
| 2370 | E_{1b}E₂E₄ | Eᵥᵢᵢ | E₄* | |
| 2371 | E₁ₐE₂E₃E₄ | Eᵥᵢᵢ | E₄* | |
| 2372 | E_{1b}E₂E₃E₄ | Eᵥᵢᵢ | E₄* | |
| 2373 | E₁ₐE₂EᵢE₄ | Eᵥᵢᵢ | E₄* | |
| 2374 | E_{1b}E₂EᵢE₄ | Eᵥᵢᵢ | E₄* | |
| 2375 | E₁ₐE₂EᵢᵢE₄ | Eᵥᵢᵢ | E₄* | |
| 2376 | E_{1b}E₂EᵢᵢE₄ | Eᵥᵢᵢ | E₄* | |
| 2377 | E₁ₐE₂EᵢᵢE_{iib}E₄ | Eᵥᵢᵢ | E₄* | |
| 2378 | E_{1b}E₂EᵢᵢE_{iib}E₄ | Eᵥᵢᵢ | E₄* | |
| 2379 | E₁ₐE₂E₃EᵢE₄ | Eᵥᵢᵢ | E₄* | |
| 2380 | E_{1b}E₂E₃EᵢE₄ | Eᵥᵢᵢ | E₄* | |
| 2381 | E₁ₐE₂E₃EᵢᵢE₄ | Eᵥᵢᵢ | E₄* | |
| 2382 | E_{1b}E₂E₃EᵢᵢE₄ | Eᵥᵢᵢ | E₄* | |
| 2383 | E₁ₐE₂E₃EᵢᵢE_{iib}E₄ | Eᵥᵢᵢ | E₄* | |
| 2384 | E_{1b}E₂E₃EᵢᵢE_{iib}E₄ | Eᵥᵢᵢ | E₄* | |
| 2385 | E₁ₐE₂Eᵢᵢᵢ | Eᵥᵢᵢ | E₄* | |
| 2386 | E_{1b}E₂Eᵢᵢᵢ | Eᵥᵢᵢ | E₄* | |
| 2387 | E₁ₐE₂E₃Eᵢᵢᵢ | Eᵥᵢᵢ | E₄* | |
| 2388 | E_{1b}E₂E₃Eᵢᵢᵢ | Eᵥᵢᵢ | E₄* | |
| 2389 | E₁ₐE₂EᵢᵢᵢE₄ | Eᵥᵢᵢ | E₄* | |
| 2390 | E_{1b}E₂EᵢᵢᵢE₄ | Eᵥᵢᵢ | E₄* | |
| 2391 | E₁ₐE₂E₃EᵢᵢᵢE₄ | Eᵥᵢᵢ | E₄* | |
| 2392 | E_{1b}E₂E₃EᵢᵢᵢE₄ | Eᵥᵢᵢ | E₄* | |
| 2393 | E₁ₐE₂Eᵢᵥ | Eᵥᵢᵢ | E₄* | |
| 2394 | E_{1b}E₂Eᵢᵥ | Eᵥᵢᵢ | E₄* | |
| 2395 | E₁ₐE₂E₃Eᵢᵥ | Eᵥᵢᵢ | E₄* | |
| 2396 | E_{1b}E₂E₃Eᵢᵥ | Eᵥᵢᵢ | E₄* | |
| 2397 | E₁ₐE₂EᵢᵥE₄ | Eᵥᵢᵢ | E₄* | |
| 2398 | E_{1b}E₂EᵢᵥE₄ | Eᵥᵢᵢ | E₄* | |
| 2399 | E₁ₐE₂E₃EᵢᵥE₄ | Eᵥᵢᵢ | E₄* | |
| 2400 | E_{1b}E₂E₃EᵢᵥE₄ | Eᵥᵢᵢ | E₄* | |
| 2401 | E₁ₐE₂ | Eᵥᵢᵢ | E₅ | |
| 2402 | E_{1b}E₂ | Eᵥᵢᵢ | E₅ | |
| 2403 | E₁ₐE₂E₃ | Eᵥᵢᵢ | E₅ | |
| 2404 | E_{1b}E₂E₃ | Eᵥᵢᵢ | E₅ | |
| 2405 | E₁ₐE₂Eᵢ | Eᵥᵢᵢ | E₅ | |
| 2406 | E_{1b}E₂Eᵢ | Eᵥᵢᵢ | E₅ | |
| 2407 | E₁ₐE₂Eᵢᵢ | Eᵥᵢᵢ | E₅ | |
| 2408 | E_{1b}E₂Eᵢᵢ | Eᵥᵢᵢ | E₅ | |
| 2409 | E₁ₐE₂EᵢᵢE_{iib} | Eᵥᵢᵢ | E₅ | |
| 2410 | E_{1b}E₂EᵢᵢE_{iib} | Eᵥᵢᵢ | E₅ | |
| 2411 | E₁ₐE₂E₃Eᵢ | Eᵥᵢᵢ | E₅ | |
| 2412 | E_{1b}E₂E₃Eᵢ | Eᵥᵢᵢ | E₅ | |
| 2413 | E₁ₐE₂E₃Eᵢᵢ | Eᵥᵢᵢ | E₅ | |
| 2414 | E_{1b}E₂E₃Eᵢᵢ | Eᵥᵢᵢ | E₅ | |
| 2415 | E₁ₐE₂E₃EᵢᵢE_{iib} | Eᵥᵢᵢ | E₅ | |
| 2416 | E_{1b}E₂E₃EᵢᵢE_{iib} | Eᵥᵢᵢ | E₅ | |
| 2417 | E₁ₐE₂E₄ | Eᵥᵢᵢ | E₅ | |
| 2418 | E_{1b}E₂E₄ | Eᵥᵢᵢ | E₅ | |
| 2419 | E₁ₐE₂E₃E₄ | Eᵥᵢᵢ | E₅ | |
| 2420 | E_{1b}E₂E₃E₄ | Eᵥᵢᵢ | E₅ | |
| 2421 | E₁ₐE₂EᵢE₄ | Eᵥᵢᵢ | E₅ | |
| 2422 | E_{1b}E₂EᵢE₄ | Eᵥᵢᵢ | E₅ | |
| 2423 | E₁ₐE₂EᵢᵢE₄ | Eᵥᵢᵢ | E₅ | |
| 2424 | E_{1b}E₂EᵢᵢE₄ | Eᵥᵢᵢ | E₅ | |
| 2425 | E₁ₐE₂EᵢᵢE_{iib}E₄ | Eᵥᵢᵢ | E₅ | |
| 2426 | E_{1b}E₂EᵢᵢE_{iib}E₄ | Eᵥᵢᵢ | E₅ | |
| 2427 | E₁ₐE₂E₃EᵢE₄ | Eᵥᵢᵢ | E₅ | |
| 2428 | E_{1b}E₂E₃EᵢE₄ | Eᵥᵢᵢ | E₅ | |
| 2429 | E₁ₐE₂E₃EᵢᵢE₄ | Eᵥᵢᵢ | E₅ | |
| 2430 | E_{1b}E₂E₃EᵢᵢE₄ | Eᵥᵢᵢ | E₅ | |
| 2431 | E₁ₐE₂E₃EᵢᵢE_{iib}E₄ | Eᵥᵢᵢ | E₅ | |
| 2432 | E_{1b}E₂E₃EᵢᵢE_{iib}E₄ | Eᵥᵢᵢ | E₅ | |
| 2433 | E₁ₐE₂Eᵢᵢᵢ | Eᵥᵢᵢ | E₅ | |
| 2434 | E_{1b}E₂Eᵢᵢᵢ | Eᵥᵢᵢ | E₅ | |
| 2435 | E₁ₐE₂E₃Eᵢᵢᵢ | Eᵥᵢᵢ | E₅ | |
| 2436 | E_{1b}E₂E₃Eᵢᵢᵢ | Eᵥᵢᵢ | E₅ | |
| 2437 | E₁ₐE₂EᵢᵢᵢE₄ | Eᵥᵢᵢ | E₅ | |
| 2438 | E_{1b}E₂EᵢᵢᵢE₄ | Eᵥᵢᵢ | E₅ | |
| 2439 | E₁ₐE₂E₃EᵢᵢᵢE₄ | Eᵥᵢᵢ | E₅ | |
| 2440 | E_{1b}E₂E₃EᵢᵢᵢE₄ | Eᵥᵢᵢ | E₅ | |
| 2441 | E₁ₐE₂Eᵢᵥ | Eᵥᵢᵢ | E₅ | |
| 2442 | E_{1b}E₂Eᵢᵥ | Eᵥᵢᵢ | E₅ | |
| 2443 | E₁ₐE₂E₃Eᵢᵥ | Eᵥᵢᵢ | E₅ | |
| 2444 | E_{1b}E₂E₃Eᵢᵥ | Eᵥᵢᵢ | E₅ | |
| 2445 | E₁ₐE₂EᵢᵥE₄ | Eᵥᵢᵢ | E₅ | |
| 2446 | E_{1b}E₂EᵢᵥE₄ | Eᵥᵢᵢ | E₅ | |
| 2447 | E₁ₐE₂E₃EᵢᵥE₄ | Eᵥᵢᵢ | E₅ | |
| 2448 | E_{1b}E₂E₃EᵢᵥE₄ | Eᵥᵢᵢ | E₅ | |
| 2449 | E₁ₐE₂ | Eᵥᵢᵢ | E₄*E₅ | |
| 2450 | E_{1b}E₂ | Eᵥᵢᵢ | E₄*E₅ | |
| 2451 | E₁ₐE₂E₃ | Eᵥᵢᵢ | E₄*E₅ | |
| 2452 | E_{1b}E₂E₃ | Eᵥᵢᵢ | E₄*E₅ | |
| 2453 | E₁ₐE₂Eᵢ | Eᵥᵢᵢ | E₄*E₅ | |
| 2454 | E_{1b}E₂Eᵢ | Eᵥᵢᵢ | E₄*E₅ | |
| 2455 | E₁ₐE₂Eᵢᵢ | Eᵥᵢᵢ | E₄*E₅ | |
| 2456 | E_{1b}E₂Eᵢᵢ | Eᵥᵢᵢ | E₄*E₅ | |
| 2457 | E₁ₐE₂EᵢᵢE_{iib} | Eᵥᵢᵢ | E₄*E₅ | |
| 2458 | E_{1b}E₂EᵢᵢE_{iib} | Eᵥᵢᵢ | E₄*E₅ | |
| 2459 | E₁ₐE₂E₃Eᵢ | Eᵥᵢᵢ | E₄*E₅ | |
| 2460 | E_{1b}E₂E₃Eᵢ | Eᵥᵢᵢ | E₄*E₅ | |
| 2461 | E₁ₐE₂E₃Eᵢᵢ | Eᵥᵢᵢ | E₄*E₅ | |
| 2462 | E_{1b}E₂E₃Eᵢᵢ | Eᵥᵢᵢ | E₄*E₅ | |
| 2463 | E₁ₐE₂E₃EᵢᵢE_{iib} | Eᵥᵢᵢ | E₄*E₅ | |
| 2464 | E_{1b}E₂E₃EᵢᵢE_{iib} | Eᵥᵢᵢ | E₄*E₅ | |
| 2465 | E₁ₐE₂E₄ | Eᵥᵢᵢ | E₄*E₅ | |
| 2466 | E_{1b}E₂E₄ | Eᵥᵢᵢ | E₄*E₅ | |
| 2467 | E₁ₐE₂E₃E₄ | Eᵥᵢᵢ | E₄*E₅ | |
| 2468 | E_{1b}E₂E₃E₄ | Eᵥᵢᵢ | E₄*E₅ | |
| 2469 | E₁ₐE₂EᵢE₄ | Eᵥᵢᵢ | E₄*E₅ | |
| 2470 | E_{1b}E₂EᵢE₄ | Eᵥᵢᵢ | E₄*E₅ | |
| 2471 | E₁ₐE₂EᵢᵢE₄ | Eᵥᵢᵢ | E₄*E₅ | |
| 2472 | E_{1b}E₂EᵢᵢE₄ | Eᵥᵢᵢ | E₄*E₅ | |
| 2473 | E₁ₐE₂EᵢᵢE_{iib}E₄ | Eᵥᵢᵢ | E₄*E₅ | |
| 2474 | E_{1b}E₂EᵢᵢE_{iib}E₄ | Eᵥᵢᵢ | E₄*E₅ | |
| 2475 | E₁ₐE₂E₃EᵢE₄ | Eᵥᵢᵢ | E₄*E₅ | |
| 2476 | E_{1b}E₂E₃EᵢE₄ | Eᵥᵢᵢ | E₄*E₅ | |
| 2477 | E₁ₐE₂E₃EᵢᵢE₄ | Eᵥᵢᵢ | E₄*E₅ | |
| 2478 | E_{1b}E₂E₃EᵢᵢE₄ | Eᵥᵢᵢ | E₄*E₅ | |
| 2479 | E₁ₐE₂E₃EᵢᵢE_{iib}E₄ | Eᵥᵢᵢ | E₄*E₅ | |
| 2480 | E_{1b}E₂E₃EᵢᵢE_{iib}E₄ | Eᵥᵢᵢ | E₄*E₅ | |
| 2481 | E₁ₐE₂Eᵢᵢᵢ | Eᵥᵢᵢ | E₄*E₅ | |
| 2482 | E_{1b}E₂Eᵢᵢᵢ | Eᵥᵢᵢ | E₄*E₅ | |
| 2483 | E₁ₐE₂E₃Eᵢᵢᵢ | Eᵥᵢᵢ | E₄*E₅ | |
| 2484 | E_{1b}E₂E₃Eᵢᵢᵢ | Eᵥᵢᵢ | E₄*E₅ | |
| 2485 | E₁ₐE₂EᵢᵢᵢE₄ | Eᵥᵢᵢ | E₄*E₅ | |
| 2486 | E_{1b}E₂EᵢᵢᵢE₄ | Eᵥᵢᵢ | E₄*E₅ | |
| 2487 | E₁ₐE₂E₃EᵢᵢᵢE₄ | Eᵥᵢᵢ | E₄*E₅ | |
| 2488 | E_{1b}E₂E₃EᵢᵢᵢE₄ | Eᵥᵢᵢ | E₄*E₅ | |
| 2489 | E₁ₐE₂Eᵢᵥ | Eᵥᵢᵢ | E₄*E₅ | |
| 2490 | E_{1b}E₂Eᵢᵥ | Eᵥᵢᵢ | E₄*E₅ | |
| 2491 | E₁ₐE₂E₃Eᵢᵥ | Eᵥᵢᵢ | E₄*E₅ | |
| 2492 | E_{1b}E₂E₃Eᵢᵥ | Eᵥᵢᵢ | E₄*E₅ | |
| 2493 | E₁ₐE₂EᵢᵥE₄ | Eᵥᵢᵢ | E₄*E₅ | |
| 2494 | E_{1b}E₂EᵢᵥE₄ | Eᵥᵢᵢ | E₄*E₅ | |
| 2495 | E₁ₐE₂E₃EᵢᵥE₄ | Eᵥᵢᵢ | E₄*E₅ | |
| 2496 | E_{1b}E₂E₃EᵢᵥE₄ | Eᵥᵢᵢ | E₄*E₅ | |
| 2497 | E₁ₐE₂ | AlkLEᵥᵢᵢ | | |
| 2498 | E_{1b}E₂ | AlkLEᵥᵢᵢ | | |
| 2499 | E₁ₐE₂E₃ | AlkLEᵥᵢᵢ | | |
| 2500 | E_{1b}E₂E₃ | AlkLEᵥᵢᵢ | | |
| 2501 | E₁ₐE₂Eᵢ | AlkLEᵥᵢᵢ | | |
| 2502 | E_{1b}E₂Eᵢ | AlkLEᵥᵢᵢ | | |
| 2503 | E₁ₐE₂Eᵢᵢ | AlkLEᵥᵢᵢ | | |
| 2504 | E_{1b}E₂Eᵢᵢ | AlkLEᵥᵢᵢ | | |
| 2505 | E₁ₐE₂EᵢᵢE_{iib} | AlkLEᵥᵢᵢ | | |
| 2506 | E_{1b}E₂EᵢᵢE_{iib} | AlkLEᵥᵢᵢ | | |
| 2507 | E₁ₐE₂E₃Eᵢ | AlkLEᵥᵢᵢ | | |
| 2508 | E_{1b}E₂E₃Eᵢ | AlkLEᵥᵢᵢ | | |
| 2509 | E₁ₐE₂E₃Eᵢᵢ | AlkLEᵥᵢᵢ | | |
| 2510 | E_{1b}E₂E₃Eᵢᵢ | AlkLEᵥᵢᵢ | | |
| 2511 | E₁ₐE₂E₃EᵢᵢE_{iib} | AlkLEᵥᵢᵢ | | |
| 2512 | E_{1b}E₂E₃EᵢᵢE_{iib} | AlkLEᵥᵢᵢ | | |
| 2513 | E₁ₐE₂E₄ | AlkLEᵥᵢᵢ | | |
| 2514 | E_{1b}E₂E₄ | AlkLEᵥᵢᵢ | | |
| 2515 | E₁ₐE₂E₃E₄ | AlkLEᵥᵢᵢ | | |
| 2516 | E_{1b}E₂E₃E₄ | AlkLEᵥᵢᵢ | | |
| 2517 | E₁ₐE₂EᵢE₄ | AlkLEᵥᵢᵢ | | |
| 2518 | E_{1b}E₂EᵢE₄ | AlkLEᵥᵢᵢ | | |
| 2519 | E₁ₐE₂EᵢᵢE₄ | AlkLEᵥᵢᵢ | | |
| 2520 | E_{1b}E₂EᵢᵢE₄ | AlkLEᵥᵢᵢ | | |
| 2521 | E₁ₐE₂EᵢᵢE_{iib}E₄ | AlkLEᵥᵢᵢ | | |
| 2522 | E_{1b}E₂EᵢᵢE_{iib}E₄ | AlkLEᵥᵢᵢ | | |
| 2523 | E₁ₐE₂E₃EᵢE₄ | AlkLEᵥᵢᵢ | | |
| 2524 | E_{1b}E₂E₃EᵢE₄ | AlkLEᵥᵢᵢ | | |
| 2525 | E₁ₐE₂E₃EᵢᵢE₄ | AlkLEᵥᵢᵢ | | |
| 2526 | E_{1b}E₂E₃EᵢᵢE₄ | AlkLEᵥᵢᵢ | | |
| 2527 | E₁ₐE₂E₃EᵢᵢE_{iib}E₄ | AlkLEᵥᵢᵢ | | |
| 2528 | E_{1b}E₂E₃EᵢᵢE_{iib}E₄ | AlkLEᵥᵢᵢ | | |
| 2529 | E₁ₐE₂Eᵢᵢᵢ | AlkLEᵥᵢᵢ | | |
| 2530 | E_{1b}E₂Eᵢᵢᵢ | AlkLEᵥᵢᵢ | | |
| 2531 | E₁ₐE₂E₃Eᵢᵢᵢ | AlkLEᵥᵢᵢ | | |
| 2532 | E_{1b}E₂E₃Eᵢᵢᵢ | AlkLEᵥᵢᵢ | | |
| 2533 | E₁ₐE₂EᵢᵢᵢE₄ | AlkLEᵥᵢᵢ | | |
| 2534 | E_{1b}E₂EᵢᵢᵢE₄ | AlkLEᵥᵢᵢ | | |
| 2535 | E₁ₐE₂E₃EᵢᵢᵢE₄ | AlkLEᵥᵢᵢ | | |
| 2536 | E_{1b}E₂E₃EᵢᵢᵢE₄ | AlkLEᵥᵢᵢ | | |
| 2537 | E₁ₐE₂Eᵢᵥ | AlkLEᵥᵢᵢ | | |
| 2538 | E_{1b}E₂Eᵢᵥ | AlkLEᵥᵢᵢ | | |
| 2539 | E₁ₐE₂E₃Eᵢᵥ | AlkLEᵥᵢᵢ | | |
| 2540 | E_{1b}E₂E₃Eᵢᵥ | AlkLEᵥᵢᵢ | | |
| 2541 | E₁ₐE₂EᵢᵥE₄ | AlkLEᵥᵢᵢ | | |
| 2542 | E_{1b}E₂EᵢᵥE₄ | AlkLEᵥᵢᵢ | | |
| 2543 | E₁ₐE₂E₃EᵢᵥE₄ | AlkLEᵥᵢᵢ | | |
| 2544 | E_{1b}E₂E₃EᵢᵥE₄ | AlkLEᵥᵢᵢ | | |
| 2545 | E₁ₐE₂ | AlkLEᵥᵢᵢ | E₄* | |
| 2546 | E_{1b}E₂ | AlkLEᵥᵢᵢ | E₄* | |
| 2547 | E₁ₐE₂E₃ | AlkLEᵥᵢᵢ | E₄* | |
| 2548 | E_{1b}E₂E₃ | AlkLEᵥᵢᵢ | E₄* | |
| 2549 | E₁ₐE₂Eᵢ | AlkLEᵥᵢᵢ | E₄* | |
| 2550 | E_{1b}E₂Eᵢ | AlkLEᵥᵢᵢ | E₄* | |
| 2551 | E₁ₐE₂Eᵢᵢ | AlkLEᵥᵢᵢ | E₄* | |
| 2552 | E_{1b}E₂Eᵢᵢ | AlkLEᵥᵢᵢ | E₄* | |
| 2553 | E₁ₐE₂EᵢᵢE_{iib} | AlkLEᵥᵢᵢ | E₄* | |
| 2554 | E_{1b}E₂EᵢᵢE_{iib} | AlkLEᵥᵢᵢ | E₄* | |
| 2555 | E₁ₐE₂E₃Eᵢ | AlkLEᵥᵢᵢ | E₄* | |
| 2556 | E_{1b}E₂E₃Eᵢ | AlkLEᵥᵢᵢ | E₄* | |
| 2557 | E₁ₐE₂E₃Eᵢᵢ | AlkLEᵥᵢᵢ | E₄* | |
| 2558 | E_{1b}E₂E₃Eᵢᵢ | AlkLEᵥᵢᵢ | E₄* | |
| 2559 | E₁ₐE₂E₃EᵢᵢE_{iib} | AlkLEᵥᵢᵢ | E₄* | |
| 2560 | E_{1b}E₂E₃EᵢᵢE_{iib} | AlkLEᵥᵢᵢ | E₄* | |
| 2561 | E₁ₐE₂E₄ | AlkLEᵥᵢᵢ | E₄* | |
| 2562 | E_{1b}E₂E₄ | AlkLEᵥᵢᵢ | E₄* | |
| 2563 | E₁ₐE₂E₃E₄ | AlkLEᵥᵢᵢ | E₄* | |
| 2564 | E_{1b}E₂E₃E₄ | AlkLEᵥᵢᵢ | E₄* | |
| 2565 | E₁ₐE₂EᵢE₄ | AlkLEᵥᵢᵢ | E₄* | |
| 2566 | E_{1b}E₂EᵢE₄ | AlkLEᵥᵢᵢ | E₄* | |
| 2567 | E₁ₐE₂EᵢᵢE₄ | AlkLEᵥᵢᵢ | E₄* | |
| 2568 | E_{1b}E₂EᵢᵢE₄ | AlkLEᵥᵢᵢ | E₄* | |
| 2569 | E₁ₐE₂EᵢᵢE_{iib}E₄ | AlkLEᵥᵢᵢ | E₄* | |
| 2570 | E_{1b}E₂EᵢᵢE_{iib}E₄ | AlkLEᵥᵢᵢ | E₄* | |
| 2571 | E₁ₐE₂E₃EᵢE₄ | AlkLEᵥᵢᵢ | E₄* | |
| 2572 | E_{1b}E₂E₃EᵢE₄ | AlkLEᵥᵢᵢ | E₄* | |
| 2573 | E₁ₐE₂E₃EᵢᵢE₄ | AlkLEᵥᵢᵢ | E₄* | |
| 2574 | E_{1b}E₂E₃EᵢᵢE₄ | AlkLEᵥᵢᵢ | E₄* | |
| 2575 | E₁ₐE₂E₃EᵢᵢE_{iib}E₄ | AlkLEᵥᵢᵢ | E₄* | |
| 2576 | E_{1b}E₂E₃EᵢᵢE_{iib}E₄ | AlkLEᵥᵢᵢ | E₄* | |
| 2577 | E₁ₐE₂Eᵢᵢᵢ | AlkLEᵥᵢᵢ | E₄* | |
| 2578 | E_{1b}E₂Eᵢᵢᵢ | AlkLEᵥᵢᵢ | E₄* | |
| 2579 | E₁ₐE₂E₃Eᵢᵢᵢ | AlkLEᵥᵢᵢ | E₄* | |
| 2580 | E_{1b}E₂E₃Eᵢᵢᵢ | AlkLEᵥᵢᵢ | E₄* | |
| 2581 | E₁ₐE₂EᵢᵢᵢE₄ | AlkLEᵥᵢᵢ | E₄* | |
| 2582 | E_{1b}E₂EᵢᵢᵢE₄ | AlkLEᵥᵢᵢ | E₄* | |
| 2583 | E₁ₐE₂E₃EᵢᵢᵢE₄ | AlkLEᵥᵢᵢ | E₄* | |
| 2584 | E_{1b}E₂E₃EᵢᵢᵢE₄ | AlkLEᵥᵢᵢ | E₄* | |
| 2585 | E₁ₐE₂Eᵢᵥ | AlkLEᵥᵢᵢ | E₄* | |
| 2586 | E_{1b}E₂Eᵢᵥ | AlkLEᵥᵢᵢ | E₄* | |
| 2587 | E₁ₐE₂E₃Eᵢᵥ | AlkLEᵥᵢᵢ | E₄* | |
| 2588 | E_{1b}E₂E₃Eᵢᵥ | AlkLEᵥᵢᵢ | E₄* | |
| 2589 | E₁ₐE₂EᵢᵥE₄ | AlkLEᵥᵢᵢ | E₄* | |
| 2590 | E_{1b}E₂EᵢᵥE₄ | AlkLEᵥᵢᵢ | E₄* | |
| 2591 | E₁ₐE₂E₃EᵢᵥE₄ | AlkLEᵥᵢᵢ | E₄* | |
| 2592 | E_{1b}E₂E₃EᵢᵥE₄ | AlkLEᵥᵢᵢ | E₄* | |
| 2593 | E₁ₐE₂ | AlkLEᵥᵢᵢ | E₅ | |
| 2594 | E_{1b}E₂ | AlkLEᵥᵢᵢ | E₅ | |
| 2595 | E₁ₐE₂E₃ | AlkLEᵥᵢᵢ | E₅ | |
| 2596 | E_{1b}E₂E₃ | AlkLEᵥᵢᵢ | E₅ | |
| 2597 | E₁ₐE₂Eᵢ | AlkLEᵥᵢᵢ | E₅ | |
| 2598 | E_{1b}E₂Eᵢ | AlkLEᵥᵢᵢ | E₅ | |
| 2599 | E₁ₐE₂Eᵢᵢ | AlkLEᵥᵢᵢ | E₅ | |
| 2600 | E_{1b}E₂Eᵢᵢ | AlkLEᵥᵢᵢ | E₅ | |
| 2601 | E₁ₐE₂EᵢᵢE_{iib} | AlkLEᵥᵢᵢ | E₅ | |
| 2602 | E_{1b}E₂EᵢᵢE_{iib} | AlkLEᵥᵢᵢ | E₅ | |
| 2603 | E₁ₐE₂E₃Eᵢ | AlkLEᵥᵢᵢ | E₅ | |
| 2604 | E_{1b}E₂E₃Eᵢ | AlkLEᵥᵢᵢ | E₅ | |
| 2605 | E₁ₐE₂E₃Eᵢᵢ | AlkLEᵥᵢᵢ | E₅ | |
| 2606 | E_{1b}E₂E₃Eᵢᵢ | AlkLEᵥᵢᵢ | E₅ | |
| 2607 | E₁ₐE₂E₃EᵢᵢE_{iib} | AlkLEᵥᵢᵢ | E₅ | |
| 2608 | E_{1b}E₂E₃EᵢᵢE_{iib} | AlkLEᵥᵢᵢ | E₅ | |
| 2609 | E₁ₐE₂E₄ | AlkLEᵥᵢᵢ | E₅ | |
| 2610 | E_{1b}E₂E₄ | AlkLEᵥᵢᵢ | E₅ | |
| 2611 | E₁ₐE₂E₃E₄ | AlkLEᵥᵢᵢ | E₅ | |
| 2612 | E_{1b}E₂E₃E₄ | AlkLEᵥᵢᵢ | E₅ | |
| 2613 | E₁ₐE₂EᵢE₄ | AlkLEᵥᵢᵢ | E₅ | |
| 2614 | E_{1b}E₂EᵢE₄ | AlkLEᵥᵢᵢ | E₅ | |
| 2615 | E₁ₐE₂EᵢᵢE₄ | AlkLEᵥᵢᵢ | E₅ | |
| 2616 | E_{1b}E₂EᵢᵢE₄ | AlkLEᵥᵢᵢ | E₅ | |
| 2617 | E₁ₐE₂EᵢᵢE_{iib}E₄ | AlkLEᵥᵢᵢ | E₅ | |
| 2618 | E_{1b}E₂EᵢᵢE_{iib}E₄ | AlkLEᵥᵢᵢ | E₅ | |
| 2619 | E₁ₐE₂E₃EᵢE₄ | AlkLEᵥᵢᵢ | E₅ | |
| 2620 | E_{1b}E₂E₃EᵢE₄ | AlkLEᵥᵢᵢ | E₅ | |
| 2621 | E₁ₐE₂E₃EᵢᵢE₄ | AlkLEᵥᵢᵢ | E₅ | |
| 2622 | E_{1b}E₂E₃EᵢᵢE₄ | AlkLEᵥᵢᵢ | E₅ | |
| 2623 | E₁ₐE₂E₃EᵢᵢE_{iib}E₄ | AlkLEᵥᵢᵢ | E₅ | |
| 2624 | E_{1b}E₂E₃EᵢᵢE_{iib}E₄ | AlkLEᵥᵢᵢ | E₅ | |
| 2625 | E₁ₐE₂Eᵢᵢᵢ | AlkLEᵥᵢᵢ | E₅ | |
| 2626 | E_{1b}E₂Eᵢᵢᵢ | AlkLEᵥᵢᵢ | E₅ | |
| 2627 | E₁ₐE₂E₃Eᵢᵢᵢ | AlkLEᵥᵢᵢ | E₅ | |
| 2628 | E_{1b}E₂E₃Eᵢᵢᵢ | AlkLEᵥᵢᵢ | E₅ | |
| 2629 | E₁ₐE₂EᵢᵢᵢE₄ | AlkLEᵥᵢᵢ | E₅ | |
| 2630 | E_{1b}E₂EᵢᵢᵢE₄ | AlkLEᵥᵢᵢ | E₅ | |
| 2631 | E₁ₐE₂E₃EᵢᵢᵢE₄ | AlkLEᵥᵢᵢ | E₅ | |
| 2632 | E_{1b}E₂E₃EᵢᵢᵢE₄ | AlkLEᵥᵢᵢ | E₅ | |
| 2633 | E₁ₐE₂Eᵢᵥ | AlkLEᵥᵢᵢ | E₅ | |
| 2634 | E_{1b}E₂Eᵢᵥ | AlkLEᵥᵢᵢ | E₅ | |
| 2635 | E₁ₐE₂E₃Eᵢᵥ | AlkLEᵥᵢᵢ | E₅ | |
| 2636 | E_{1b}E₂E₃Eᵢᵥ | AlkLEᵥᵢᵢ | E₅ | |
| 2637 | E₁ₐE₂EᵢᵥE₄ | AlkLEᵥᵢᵢ | E₅ | |
| 2638 | E_{1b}E₂EᵢᵥE₄ | AlkLEᵥᵢᵢ | E₅ | |
| 2639 | E₁ₐE₂E₃EᵢᵥE₄ | AlkLEᵥᵢᵢ | E₅ | |
| 2640 | E_{1b}E₂E₃EᵢᵥE₄ | AlkLEᵥᵢᵢ | E₅ | |
| 2641 | E₁ₐE₂ | AlkLEᵥᵢᵢ | E₄*E₅ | |
| 2642 | E_{1b}E₂ | AlkLEᵥᵢᵢ | E₄*E₅ | |
| 2643 | E₁ₐE₂E₃ | AlkLEᵥᵢᵢ | E₄*E₅ | |
| 2644 | E_{1b}E₂E₃ | AlkLEᵥᵢᵢ | E₄*E₅ | |
| 2645 | E₁ₐE₂Eᵢ | AlkLEᵥᵢᵢ | E₄*E₅ | |
| 2646 | E_{1b}E₂Eᵢ | AlkLEᵥᵢᵢ | E₄*E₅ | |
| 2647 | E₁ₐE₂Eᵢᵢ | AlkLEᵥᵢᵢ | E₄*E₅ | |
| 2648 | E_{1b}E₂Eᵢᵢ | AlkLEᵥᵢᵢ | E₄*E₅ | |
| 2649 | E₁ₐE₂EᵢᵢE_{iib} | AlkLEᵥᵢᵢ | E₄*E₅ | |
| 2650 | E_{1b}E₂EᵢᵢE_{iib} | AlkLEᵥᵢᵢ | E₄*E₅ | |
| 2651 | E₁ₐE₂E₃Eᵢ | AlkLEᵥᵢᵢ | E₄*E₅ | |
| 2652 | E_{1b}E₂E₃Eᵢ | AlkLEᵥᵢᵢ | E₄*E₅ | |
| 2653 | E₁ₐE₂E₃Eᵢᵢ | AlkLEᵥᵢᵢ | E₄*E₅ | |
| 2654 | E_{1b}E₂E₃Eᵢᵢ | AlkLEᵥᵢᵢ | E₄*E₅ | |
| 2655 | E₁ₐE₂E₃EᵢᵢE_{iib} | AlkLEᵥᵢᵢ | E₄*E₅ | |
| 2656 | E_{1b}E₂E₃EᵢᵢE_{iib} | AlkLEᵥᵢᵢ | E₄*E₅ | |
| 2657 | E₁ₐE₂E₄ | AlkLEᵥᵢᵢ | E₄*E₅ | |
| 2658 | E_{1b}E₂E₄ | AlkLEᵥᵢᵢ | E₄*E₅ | |
| 2659 | E₁ₐE₂E₃E₄ | AlkLEᵥᵢᵢ | E₄*E₅ | |
| 2660 | E_{1b}E₂E₃E₄ | AlkLEᵥᵢᵢ | E₄*E₅ | |
| 2661 | E₁ₐE₂EᵢE₄ | AlkLEᵥᵢᵢ | E₄*E₅ | |
| 2662 | E_{1b}E₂EᵢE₄ | AlkLEᵥᵢᵢ | E₄*E₅ | |
| 2663 | E₁ₐE₂EᵢᵢE₄ | AlkLEᵥᵢᵢ | E₄*E₅ | |
| 2664 | E_{1b}E₂EᵢᵢE₄ | AlkLEᵥᵢᵢ | E₄*E₅ | |
| 2665 | E₁ₐE₂EᵢᵢE_{iib}E₄ | AlkLEᵥᵢᵢ | E₄*E₅ | |
| 2666 | E_{1b}E₂EᵢᵢE_{iib}E₄ | AlkLEᵥᵢᵢ | E₄*E₅ | |
| 2667 | E₁ₐE₂E₃EᵢE₄ | AlkLEᵥᵢᵢ | E₄*E₅ | |
| 2668 | E_{1b}E₂E₃EᵢE₄ | AlkLEᵥᵢᵢ | E₄*E₅ | |
| 2669 | E₁ₐE₂E₃EᵢᵢE₄ | AlkLEᵥᵢᵢ | E₄*E₅ | |
| 2670 | E_{1b}E₂E₃EᵢᵢE₄ | AlkLEᵥᵢᵢ | E₄*E₅ | |
| 2671 | E₁ₐE₂E₃EᵢᵢE_{iib}E₄ | AlkLEᵥᵢᵢ | E₄*E₅ | |
| 2672 | E_{1b}E₂E₃EᵢᵢE_{iib}E₄ | AlkLEᵥᵢᵢ | E₄*E₅ | |
| 2673 | E₁ₐE₂Eᵢᵢᵢ | AlkLEᵥᵢᵢ | E₄*E₅ | |
| 2674 | E_{1b}E₂Eᵢᵢᵢ | AlkLEᵥᵢᵢ | E₄*E₅ | |
| 2675 | E₁ₐE₂E₃Eᵢᵢᵢ | AlkLEᵥᵢᵢ | E₄*E₅ | |
| 2676 | E_{1b}E₂E₃Eᵢᵢᵢ | AlkLEᵥᵢᵢ | E₄*E₅ | |
| 2677 | E₁ₐE₂EᵢᵢᵢE₄ | AlkLEᵥᵢᵢ | E₄*E₅ | |
| 2678 | E_{1b}E₂EᵢᵢᵢE₄ | AlkLEᵥᵢᵢ | E₄*E₅ | |
| 2679 | E₁ₐE₂E₃EᵢᵢᵢE₄ | AlkLEᵥᵢᵢ | E₄*E₅ | |
| 2680 | E_{1b}E₂E₃EᵢᵢᵢE₄ | AlkLEᵥᵢᵢ | E₄*E₅ | |
| 2681 | E₁ₐE₂Eᵢᵥ | AlkLEᵥᵢᵢ | E₄*E₅ | |
| 2682 | E_{1b}E₂Eᵢᵥ | AlkLEᵥᵢᵢ | E₄*E₅ | |
| 2683 | E₁ₐE₂E₃Eᵢᵥ | AlkLEᵥᵢᵢ | E₄*E₅ | |
| 2684 | E_{1b}E₂E₃Eᵢᵥ | AlkLEᵥᵢᵢ | E₄*E₅ | |
| 2685 | E₁ₐE₂EᵢᵥE₄ | AlkLEᵥᵢᵢ | E₄*E₅ | |
| 2686 | E_{1b}E₂EᵢᵥE₄ | AlkLEᵥᵢᵢ | E₄*E₅ | |
| 2687 | E₁ₐE₂E₃EᵢᵥE₄ | AlkLEᵥᵢᵢ | E₄*E₅ | |
| 2688 | E_{1b}E₂E₃EᵢᵥE₄ | AlkLEᵥᵢᵢ | E₄*E₅ | |
| 2689 | E₁ₐE₂ | Eᵥᵢᵢ | | Eₐ |
| 2690 | E_{1b}E₂ | Eᵥᵢᵢ | | Eₐ |
| 2691 | E₁ₐE₂E₃ | Eᵥᵢᵢ | | Eₐ |
| 2692 | E_{1b}E₂E₃ | Eᵥᵢᵢ | | Eₐ |
| 2693 | E₁ₐE₂Eᵢ | Eᵥᵢᵢ | | Eₐ |
| 2694 | E_{1b}E₂Eᵢ | Eᵥᵢᵢ | | Eₐ |
| 2695 | E₁ₐE₂Eᵢᵢ | Eᵥᵢᵢ | | Eₐ |
| 2696 | E_{1b}E₂Eᵢᵢ | Eᵥᵢᵢ | | Eₐ |
| 2697 | E₁ₐE₂EᵢᵢE_{iib} | Eᵥᵢᵢ | | Eₐ |
| 2698 | E_{1b}E₂EᵢᵢE_{iib} | Eᵥᵢᵢ | | Eₐ |
| 2699 | E₁ₐE₂E₃Eᵢ | Eᵥᵢᵢ | | Eₐ |
| 2700 | E_{1b}E₂E₃Eᵢ | Eᵥᵢᵢ | | Eₐ |
| 2701 | E₁ₐE₂E₃Eᵢᵢ | Eᵥᵢᵢ | | Eₐ |
| 2702 | E_{1b}E₂E₃Eᵢᵢ | Eᵥᵢᵢ | | Eₐ |
| 2703 | E₁ₐE₂E₃EᵢᵢE_{iib} | Eᵥᵢᵢ | | Eₐ |
| 2704 | E_{1b}E₂E₃EᵢᵢE_{iib} | Eᵥᵢᵢ | | Eₐ |
| 2705 | E₁ₐE₂E₄ | Eᵥᵢᵢ | | Eₐ |
| 2706 | E_{1b}E₂E₄ | Eᵥᵢᵢ | | Eₐ |
| 2707 | E₁ₐE₂E₃E₄ | Eᵥᵢᵢ | | Eₐ |
| 2708 | E_{1b}E₂E₃E₄ | Eᵥᵢᵢ | | Eₐ |
| 2709 | E₁ₐE₂EᵢE₄ | Eᵥᵢᵢ | | Eₐ |
| 2710 | E_{1b}E₂EᵢE₄ | Eᵥᵢᵢ | | Eₐ |
| 2711 | E₁ₐE₂EᵢᵢE₄ | Eᵥᵢᵢ | | Eₐ |
| 2712 | E_{1b}E₂EᵢᵢE₄ | Eᵥᵢᵢ | | Eₐ |
| 2713 | E₁ₐE₂EᵢᵢE_{iib}E₄ | Eᵥᵢᵢ | | Eₐ |
| 2714 | E_{1b}E₂EᵢᵢE_{iib}E₄ | Eᵥᵢᵢ | | Eₐ |
| 2715 | E₁ₐE₂E₃EᵢE₄ | Eᵥᵢᵢ | | Eₐ |
| 2716 | E_{1b}E₂E₃EᵢE₄ | Eᵥᵢᵢ | | Eₐ |
| 2717 | E₁ₐE₂E₃EᵢᵢE₄ | Eᵥᵢᵢ | | Eₐ |
| 2718 | E_{1b}E₂E₃EᵢᵢE₄ | Eᵥᵢᵢ | | Eₐ |
| 2719 | E₁ₐE₂E₃EᵢᵢE_{iib}E₄ | Eᵥᵢᵢ | | Eₐ |
| 2720 | E_{1b}E₂E₃EᵢᵢE_{iib}E₄ | Eᵥᵢᵢ | | Eₐ |
| 2721 | E₁ₐE₂Eᵢᵢᵢ | Eᵥᵢᵢ | | Eₐ |
| 2722 | E_{1b}E₂Eᵢᵢᵢ | Eᵥᵢᵢ | | Eₐ |
| 2723 | E₁ₐE₂E₃Eᵢᵢᵢ | Eᵥᵢᵢ | | Eₐ |
| 2724 | E_{1b}E₂E₃Eᵢᵢᵢ | Eᵥᵢᵢ | | Eₐ |
| 2725 | E₁ₐE₂EᵢᵢᵢE₄ | Eᵥᵢᵢ | | Eₐ |
| 2726 | E_{1b}E₂EᵢᵢᵢE₄ | Eᵥᵢᵢ | | Eₐ |
| 2727 | E₁ₐE₂E₃EᵢᵢᵢE₄ | Eᵥᵢᵢ | | Eₐ |
| 2728 | E_{1b}E₂E₃EᵢᵢᵢE₄ | Eᵥᵢᵢ | | Eₐ |
| 2729 | E₁ₐE₂Eᵢᵥ | Eᵥᵢᵢ | | Eₐ |
| 2730 | E_{1b}E₂Eᵢᵥ | Eᵥᵢᵢ | | Eₐ |
| 2731 | E₁ₐE₂E₃Eᵢᵥ | Eᵥᵢᵢ | | Eₐ |
| 2732 | E_{1b}E₂E₃Eᵢᵥ | Eᵥᵢᵢ | | Eₐ |
| 2733 | E₁ₐE₂EᵢᵥE₄ | Eᵥᵢᵢ | | Eₐ |
| 2734 | E_{1b}E₂EᵢᵥE₄ | Eᵥᵢᵢ | | Eₐ |
| 2735 | E₁ₐE₂E₃EᵢᵥE₄ | Eᵥᵢᵢ | | Eₐ |
| 2736 | E_{1b}E₂E₃EᵢᵥE₄ | Eᵥᵢᵢ | | Eₐ |
| 2737 | E₁ₐE₂ | Eᵥᵢᵢ | E₄* | Eₐ |
| 2738 | E_{1b}E₂ | Eᵥᵢᵢ | E₄* | Eₐ |
| 2739 | E₁ₐE₂E₃ | Eᵥᵢᵢ | E₄* | Eₐ |
| 2740 | E_{1b}E₂E₃ | Eᵥᵢᵢ | E₄* | Eₐ |
| 2741 | E₁ₐE₂Eᵢ | Eᵥᵢᵢ | E₄* | Eₐ |
| 2742 | E_{1b}E₂Eᵢ | Eᵥᵢᵢ | E₄* | Eₐ |
| 2743 | E₁ₐE₂Eᵢᵢ | Eᵥᵢᵢ | E₄* | Eₐ |
| 2744 | E_{1b}E₂Eᵢᵢ | Eᵥᵢᵢ | E₄* | Eₐ |
| 2745 | E₁ₐE₂EᵢᵢE_{iib} | Eᵥᵢᵢ | E₄* | Eₐ |
| 2746 | E_{1b}E₂EᵢᵢE_{iib} | Eᵥᵢᵢ | E₄* | Eₐ |
| 2747 | E₁ₐE₂E₃Eᵢ | Eᵥᵢᵢ | E₄* | Eₐ |
| 2748 | E_{1b}E₂E₃Eᵢ | Eᵥᵢᵢ | E₄* | Eₐ |
| 2749 | E₁ₐE₂E₃Eᵢᵢ | Eᵥᵢᵢ | E₄* | Eₐ |
| 2750 | E_{1b}E₂E₃Eᵢᵢ | Eᵥᵢᵢ | E₄* | Eₐ |
| 2751 | E₁ₐE₂E₃EᵢᵢE_{iib} | Eᵥᵢᵢ | E₄* | Eₐ |
| 2752 | E_{1b}E₂E₃EᵢᵢE_{iib} | Eᵥᵢᵢ | E₄* | Eₐ |
| 2753 | E₁ₐE₂E₄ | Eᵥᵢᵢ | E₄* | Eₐ |
| 2754 | E_{1b}E₂E₄ | Eᵥᵢᵢ | E₄* | Eₐ |
| 2755 | E₁ₐE₂E₃E₄ | Eᵥᵢᵢ | E₄* | Eₐ |
| 2756 | E_{1b}E₂E₃E₄ | Eᵥᵢᵢ | E₄* | Eₐ |
| 2757 | E₁ₐE₂EᵢE₄ | Eᵥᵢᵢ | E₄* | Eₐ |
| 2758 | E_{1b}E₂EᵢE₄ | Eᵥᵢᵢ | E₄* | Eₐ |
| 2759 | E₁ₐE₂EᵢᵢE₄ | Eᵥᵢᵢ | E₄* | Eₐ |
| 2760 | E_{1b}E₂EᵢᵢE₄ | Eᵥᵢᵢ | E₄* | Eₐ |
| 2761 | E₁ₐE₂EᵢᵢE_{iib}E₄ | Eᵥᵢᵢ | E₄* | Eₐ |
| 2762 | E_{1b}E₂EᵢᵢE_{iib}E₄ | Eᵥᵢᵢ | E₄* | Eₐ |
| 2763 | E₁ₐE₂E₃EᵢE₄ | Eᵥᵢᵢ | E₄* | Eₐ |
| 2764 | E_{1b}E₂E₃EᵢE₄ | Eᵥᵢᵢ | E₄* | Eₐ |
| 2765 | E₁ₐE₂E₃EᵢᵢE₄ | Eᵥᵢᵢ | E₄* | Eₐ |
| 2766 | E_{1b}E₂E₃EᵢᵢE₄ | Eᵥᵢᵢ | E₄* | Eₐ |
| 2767 | E₁ₐE₂E₃EᵢᵢE_{iib}E₄ | Eᵥᵢᵢ | E₄* | Eₐ |
| 2768 | E_{1b}E₂E₃EᵢᵢE_{iib}E₄ | Eᵥᵢᵢ | E₄* | Eₐ |
| 2769 | E₁ₐE₂Eᵢᵢᵢ | Eᵥᵢᵢ | E₄* | Eₐ |
| 2770 | E_{1b}E₂Eᵢᵢᵢ | Eᵥᵢᵢ | E₄* | Eₐ |
| 2771 | E₁ₐE₂E₃Eᵢᵢᵢ | Eᵥᵢᵢ | E₄* | Eₐ |
| 2772 | E_{1b}E₂E₃Eᵢᵢᵢ | Eᵥᵢᵢ | E₄* | Eₐ |
| 2773 | E₁ₐE₂EᵢᵢᵢE₄ | Eᵥᵢᵢ | E₄* | Eₐ |
| 2774 | E_{1b}E₂EᵢᵢᵢE₄ | Eᵥᵢᵢ | E₄* | Eₐ |
| 2775 | E₁ₐE₂E₃EᵢᵢᵢE₄ | Eᵥᵢᵢ | E₄* | Eₐ |
| 2776 | E_{1b}E₂E₃EᵢᵢᵢE₄ | Eᵥᵢᵢ | E₄* | Eₐ |
| 2777 | E₁ₐE₂Eᵢᵥ | Eᵥᵢᵢ | E₄* | Eₐ |
| 2778 | E_{1b}E₂Eᵢᵥ | Eᵥᵢᵢ | E₄* | Eₐ |
| 2779 | E₁ₐE₂E₃Eᵢᵥ | Eᵥᵢᵢ | E₄* | Eₐ |
| 2780 | E_{1b}E₂E₃Eᵢᵥ | Eᵥᵢᵢ | E₄* | Eₐ |
| 2781 | E₁ₐE₂EᵢᵥE₄ | Eᵥᵢᵢ | E₄* | Eₐ |
| 2782 | E_{1b}E₂EᵢᵥE₄ | Eᵥᵢᵢ | E₄* | Eₐ |
| 2783 | E₁ₐE₂E₃EᵢᵥE₄ | Eᵥᵢᵢ | E₄* | Eₐ |
| 2784 | E_{1b}E₂E₃EᵢᵥE₄ | Eᵥᵢᵢ | E₄* | Eₐ |
| 2785 | E₁ₐE₂ | Eᵥᵢᵢ | E₅ | Eₐ |
| 2786 | E_{1b}E₂ | Eᵥᵢᵢ | E₅ | Eₐ |
| 2787 | E₁ₐE₂E₃ | Eᵥᵢᵢ | E₅ | Eₐ |
| 2788 | E_{1b}E₂E₃ | Eᵥᵢᵢ | E₅ | Eₐ |
| 2789 | E₁ₐE₂Eᵢ | Eᵥᵢᵢ | E₅ | Eₐ |
| 2790 | E_{1b}E₂Eᵢ | Eᵥᵢᵢ | E₅ | Eₐ |
| 2791 | E₁ₐE₂Eᵢᵢ | Eᵥᵢᵢ | E₅ | Eₐ |
| 2792 | E_{1b}E₂Eᵢᵢ | Eᵥᵢᵢ | E₅ | Eₐ |
| 2793 | E₁ₐE₂EᵢᵢE_{iib} | Eᵥᵢᵢ | E₅ | Eₐ |
| 2794 | E_{1b}E₂EᵢᵢE_{iib} | Eᵥᵢᵢ | E₅ | Eₐ |
| 2795 | E₁ₐE₂E₃Eᵢ | Eᵥᵢᵢ | E₅ | Eₐ |
| 2796 | E_{1b}E₂E₃Eᵢ | Eᵥᵢᵢ | E₅ | Eₐ |
| 2797 | E₁ₐE₂E₃Eᵢᵢ | Eᵥᵢᵢ | E₅ | Eₐ |
| 2798 | E_{1b}E₂E₃Eᵢᵢ | Eᵥᵢᵢ | E₅ | Eₐ |
| 2799 | E₁ₐE₂E₃EᵢᵢE_{iib} | Eᵥᵢᵢ | E₅ | Eₐ |
| 2800 | E_{1b}E₂E₃EᵢᵢE_{iib} | Eᵥᵢᵢ | E₅ | Eₐ |
| 2801 | E₁ₐE₂E₄ | Eᵥᵢᵢ | E₅ | Eₐ |
| 2802 | E_{1b}E₂E₄ | Eᵥᵢᵢ | E₅ | Eₐ |
| 2803 | E₁ₐE₂E₃E₄ | Eᵥᵢᵢ | E₅ | Eₐ |
| 2804 | E_{1b}E₂E₃E₄ | Eᵥᵢᵢ | E₅ | Eₐ |
| 2805 | E₁ₐE₂EᵢE₄ | Eᵥᵢᵢ | E₅ | Eₐ |
| 2806 | E_{1b}E₂EᵢE₄ | Eᵥᵢᵢ | E₅ | Eₐ |
| 2807 | E₁ₐE₂EᵢᵢE₄ | Eᵥᵢᵢ | E₅ | Eₐ |
| 2808 | E_{1b}E₂EᵢᵢE₄ | Eᵥᵢᵢ | E₅ | Eₐ |
| 2809 | E₁ₐE₂EᵢᵢE_{iib}E₄ | Eᵥᵢᵢ | E₅ | Eₐ |
| 2810 | E_{1b}E₂EᵢᵢE_{iib}E₄ | Eᵥᵢᵢ | E₅ | Eₐ |
| 2811 | E₁ₐE₂E₃EᵢE₄ | Eᵥᵢᵢ | E₅ | Eₐ |
| 2812 | E_{1b}E₂E₃EᵢE₄ | Eᵥᵢᵢ | E₅ | Eₐ |
| 2813 | E₁ₐE₂E₃EᵢᵢE₄ | Eᵥᵢᵢ | E₅ | Eₐ |
| 2814 | E_{1b}E₂E₃EᵢᵢE₄ | Eᵥᵢᵢ | E₅ | Eₐ |
| 2815 | E₁ₐE₂E₃EᵢᵢE_{iib}E₄ | Eᵥᵢᵢ | E₅ | Eₐ |
| 2816 | E_{1b}E₂E₃EᵢᵢE_{iib}E₄ | Eᵥᵢᵢ | E₅ | Eₐ |
| 2817 | E₁ₐE₂Eᵢᵢᵢ | Eᵥᵢᵢ | E₅ | Eₐ |
| 2818 | E_{1b}E₂Eᵢᵢᵢ | Eᵥᵢᵢ | E₅ | Eₐ |
| 2819 | E₁ₐE₂E₃Eᵢᵢᵢ | Eᵥᵢᵢ | E₅ | Eₐ |
| 2820 | E_{1b}E₂E₃Eᵢᵢᵢ | Eᵥᵢᵢ | E₅ | Eₐ |
| 2821 | E₁ₐE₂EᵢᵢᵢE₄ | Eᵥᵢᵢ | E₅ | Eₐ |
| 2822 | E_{1b}E₂EᵢᵢᵢE₄ | Eᵥᵢᵢ | E₅ | Eₐ |
| 2823 | E₁ₐE₂E₃EᵢᵢᵢE₄ | Eᵥᵢᵢ | E₅ | Eₐ |
| 2824 | E_{1b}E₂E₃EᵢᵢᵢE₄ | Eᵥᵢᵢ | E₅ | Eₐ |
| 2825 | E₁ₐE₂Eᵢᵥ | Eᵥᵢᵢ | E₅ | Eₐ |
| 2826 | E_{1b}E₂Eᵢᵥ | Eᵥᵢᵢ | E₅ | Eₐ |
| 2827 | E₁ₐE₂E₃Eᵢᵥ | Eᵥᵢᵢ | E₅ | Eₐ |
| 2828 | E_{1b}E₂E₃Eᵢᵥ | Eᵥᵢᵢ | E₅ | Eₐ |
| 2829 | E₁ₐE₂EᵢᵥE₄ | Eᵥᵢᵢ | E₅ | Eₐ |
| 2830 | E_{1b}E₂EᵢᵥE₄ | Eᵥᵢᵢ | E₅ | Eₐ |
| 2831 | E₁ₐE₂E₃EᵢᵥE₄ | Eᵥᵢᵢ | E₅ | Eₐ |
| 2832 | E_{1b}E₂E₃EᵢᵥE₄ | Eᵥᵢᵢ | E₅ | Eₐ |
| 2833 | E₁ₐE₂ | Eᵥᵢᵢ | E₄*E₅ | Eₐ |
| 2834 | E_{1b}E₂ | Eᵥᵢᵢ | E₄*E₅ | Eₐ |
| 2835 | E₁ₐE₂E₃ | Eᵥᵢᵢ | E₄*E₅ | Eₐ |
| 2836 | E_{1b}E₂E₃ | Eᵥᵢᵢ | E₄*E₅ | Eₐ |
| 2837 | E₁ₐE₂Eᵢ | Eᵥᵢᵢ | E₄*E₅ | Eₐ |
| 2838 | E_{1b}E₂Eᵢ | Eᵥᵢᵢ | E₄*E₅ | Eₐ |
| 2839 | E₁ₐE₂Eᵢᵢ | Eᵥᵢᵢ | E₄*E₅ | Eₐ |
| 2840 | E_{1b}E₂Eᵢᵢ | Eᵥᵢᵢ | E₄*E₅ | Eₐ |
| 2841 | E₁ₐE₂EᵢᵢE_{iib} | Eᵥᵢᵢ | E₄*E₅ | Eₐ |
| 2842 | E_{1b}E₂EᵢᵢE_{iib} | Eᵥᵢᵢ | E₄*E₅ | Eₐ |
| 2843 | E₁ₐE₂E₃Eᵢ | Eᵥᵢᵢ | E₄*E₅ | Eₐ |
| 2844 | E_{1b}E₂E₃Eᵢ | Eᵥᵢᵢ | E₄*E₅ | Eₐ |
| 2845 | E₁ₐE₂E₃Eᵢᵢ | Eᵥᵢᵢ | E₄*E₅ | Eₐ |
| 2846 | E_{1b}E₂E₃Eᵢᵢ | Eᵥᵢᵢ | E₄*E₅ | Eₐ |
| 2847 | E₁ₐE₂E₃EᵢᵢE_{iib} | Eᵥᵢᵢ | E₄*E₅ | Eₐ |
| 2848 | E_{1b}E₂E₃EᵢᵢE_{iib} | Eᵥᵢᵢ | E₄*E₅ | Eₐ |
| 2849 | E₁ₐE₂E₄ | Eᵥᵢᵢ | E₄*E₅ | Eₐ |
| 2850 | E_{1b}E₂E₄ | Eᵥᵢᵢ | E₄*E₅ | Eₐ |
| 2851 | E₁ₐE₂E₃E₄ | Eᵥᵢᵢ | E₄*E₅ | Eₐ |
| 2852 | E_{1b}E₂E₃E₄ | Eᵥᵢᵢ | E₄*E₅ | Eₐ |
| 2853 | E₁ₐE₂EᵢE₄ | Eᵥᵢᵢ | E₄*E₅ | Eₐ |
| 2854 | E_{1b}E₂EᵢE₄ | Eᵥᵢᵢ | E₄*E₅ | Eₐ |
| 2855 | E₁ₐE₂EᵢᵢE₄ | Eᵥᵢᵢ | E₄*E₅ | Eₐ |
| 2856 | E_{1b}E₂EᵢᵢE₄ | Eᵥᵢᵢ | E₄*E₅ | Eₐ |
| 2857 | E₁ₐE₂EᵢᵢE_{iib}E₄ | Eᵥᵢᵢ | E₄*E₅ | Eₐ |
| 2858 | E_{1b}E₂EᵢᵢE_{iib}E₄ | Eᵥᵢᵢ | E₄*E₅ | Eₐ |
| 2859 | E₁ₐE₂E₃EᵢE₄ | Eᵥᵢᵢ | E₄*E₅ | Eₐ |
| 2860 | E_{1b}E₂E₃EᵢE₄ | Eᵥᵢᵢ | E₄*E₅ | Eₐ |
| 2861 | E₁ₐE₂E₃EᵢᵢE₄ | Eᵥᵢᵢ | E₄*E₅ | Eₐ |
| 2862 | E_{1b}E₂E₃EᵢᵢE₄ | Eᵥᵢᵢ | E₄*E₅ | Eₐ |
| 2863 | E₁ₐE₂E₃EᵢᵢE_{iib}E₄ | Eᵥᵢᵢ | E₄*E₅ | Eₐ |
| 2864 | E_{1b}E₂E₃EᵢᵢE_{iib}E₄ | Eᵥᵢᵢ | E₄*E₅ | Eₐ |
| 2865 | E₁ₐE₂Eᵢᵢᵢ | Eᵥᵢᵢ | E₄*E₅ | Eₐ |
| 2866 | E_{1b}E₂Eᵢᵢᵢ | Eᵥᵢᵢ | E₄*E₅ | Eₐ |
| 2867 | E₁ₐE₂E₃Eᵢᵢᵢ | Eᵥᵢᵢ | E₄*E₅ | Eₐ |
| 2868 | E_{1b}E₂E₃Eᵢᵢᵢ | Eᵥᵢᵢ | E₄*E₅ | Eₐ |
| 2869 | E₁ₐE₂EᵢᵢᵢE₄ | Eᵥᵢᵢ | E₄*E₅ | Eₐ |
| 2870 | E_{1b}E₂EᵢᵢᵢE₄ | Eᵥᵢᵢ | E₄*E₅ | Eₐ |
| 2871 | E₁ₐE₂E₃EᵢᵢᵢE₄ | Eᵥᵢᵢ | E₄*E₅ | Eₐ |
| 2872 | E_{1b}E₂E₃EᵢᵢᵢE₄ | Eᵥᵢᵢ | E₄*E₅ | Eₐ |
| 2873 | E₁ₐE₂Eᵢᵥ | Eᵥᵢᵢ | E₄*E₅ | Eₐ |
| 2874 | E_{1b}E₂Eᵢᵥ | Eᵥᵢᵢ | E₄*E₅ | Eₐ |
| 2875 | E₁ₐE₂E₃Eᵢᵥ | Eᵥᵢᵢ | E₄*E₅ | Eₐ |
| 2876 | E_{1b}E₂E₃Eᵢᵥ | Eᵥᵢᵢ | E₄*E₅ | Eₐ |
| 2877 | E₁ₐE₂EᵢᵥE₄ | Eᵥᵢᵢ | E₄*E₅ | Eₐ |
| 2878 | E_{1b}E₂EᵢᵥE₄ | Eᵥᵢᵢ | E₄*E₅ | Eₐ |
| 2879 | E₁ₐE₂E₃EᵢᵥE₄ | Eᵥᵢᵢ | E₄*E₅ | Eₐ |
| 2880 | E_{1b}E₂E₃EᵢᵥE₄ | Eᵥᵢᵢ | E₄*E₅ | Eₐ |
| 2881 | E₁ₐE₂ | AlkLEᵥᵢᵢ | | Eₐ |
| 2882 | E_{1b}E₂ | AlkLEᵥᵢᵢ | | Eₐ |
| 2883 | E₁ₐE₂E₃ | AlkLEᵥᵢᵢ | | Eₐ |
| 2884 | E_{1b}E₂E₃ | AlkLEᵥᵢᵢ | | Eₐ |
| 2885 | E₁ₐE₂Eᵢ | AlkLEᵥᵢᵢ | | Eₐ |
| 2886 | E_{1b}E₂Eᵢ | AlkLEᵥᵢᵢ | | Eₐ |
| 2887 | E₁ₐE₂Eᵢᵢ | AlkLEᵥᵢᵢ | | Eₐ |
| 2888 | E_{1b}E₂Eᵢᵢ | AlkLEᵥᵢᵢ | | Eₐ |
| 2889 | E₁ₐE₂EᵢᵢE_{iib} | AlkLEᵥᵢᵢ | | Eₐ |
| 2890 | E_{1b}E₂EᵢᵢE_{iib} | AlkLEᵥᵢᵢ | | Eₐ |
| 2891 | E₁ₐE₂E₃Eᵢ | AlkLEᵥᵢᵢ | | Eₐ |
| 2892 | E_{1b}E₂E₃Eᵢ | AlkLEᵥᵢᵢ | | Eₐ |
| 2893 | E₁ₐE₂E₃Eᵢᵢ | AlkLEᵥᵢᵢ | | Eₐ |
| 2894 | E_{1b}E₂E₃Eᵢᵢ | AlkLEᵥᵢᵢ | | Eₐ |
| 2895 | E₁ₐE₂E₃EᵢᵢE_{iib} | AlkLEᵥᵢᵢ | | Eₐ |
| 2896 | E_{1b}E₂E₃EᵢᵢE_{iib} | AlkLEᵥᵢᵢ | | Eₐ |
| 2897 | E₁ₐE₂E₄ | AlkLEᵥᵢᵢ | | Eₐ |
| 2898 | E_{1b}E₂E₄ | AlkLEᵥᵢᵢ | | Eₐ |
| 2899 | E₁ₐE₂E₃E₄ | AlkLEᵥᵢᵢ | | Eₐ |
| 2900 | E_{1b}E₂E₃E₄ | AlkLEᵥᵢᵢ | | Eₐ |
| 2901 | E₁ₐE₂EᵢE₄ | AlkLEᵥᵢᵢ | | Eₐ |
| 2902 | E_{1b}E₂EᵢE₄ | AlkLEᵥᵢᵢ | | Eₐ |
| 2903 | E₁ₐE₂EᵢᵢE₄ | AlkLEᵥᵢᵢ | | Eₐ |
| 2904 | E_{1b}E₂EᵢᵢE₄ | AlkLEᵥᵢᵢ | | Eₐ |
| 2905 | E₁ₐE₂EᵢᵢE_{iib}E₄ | AlkLEᵥᵢᵢ | | Eₐ |
| 2906 | E_{1b}E₂EᵢᵢE_{iib}E₄ | AlkLEᵥᵢᵢ | | Eₐ |
| 2907 | E₁ₐE₂E₃EᵢE₄ | AlkLEᵥᵢᵢ | | Eₐ |
| 2908 | E_{1b}E₂E₃EᵢE₄ | AlkLEᵥᵢᵢ | | Eₐ |
| 2909 | E₁ₐE₂E₃EᵢᵢE₄ | AlkLEᵥᵢᵢ | | Eₐ |
| 2910 | E_{1b}E₂E₃EᵢᵢE₄ | AlkLEᵥᵢᵢ | | Eₐ |
| 2911 | E₁ₐE₂E₃EᵢᵢE_{iib}E₄ | AlkLEᵥᵢᵢ | | Eₐ |
| 2912 | E_{1b}E₂E₃EᵢᵢE_{iib}E₄ | AlkLEᵥᵢᵢ | | Eₐ |
| 2913 | E₁ₐE₂Eᵢᵢᵢ | AlkLEᵥᵢᵢ | | Eₐ |
| 2914 | E_{1b}E₂Eᵢᵢᵢ | AlkLEᵥᵢᵢ | | Eₐ |
| 2915 | E₁ₐE₂E₃Eᵢᵢᵢ | AlkLEᵥᵢᵢ | | Eₐ |
| 2916 | E_{1b}E₂E₃Eᵢᵢᵢ | AlkLEᵥᵢᵢ | | Eₐ |
| 2917 | E₁ₐE₂EᵢᵢᵢE₄ | AlkLEᵥᵢᵢ | | Eₐ |
| 2918 | E_{1b}E₂EᵢᵢᵢE₄ | AlkLEᵥᵢᵢ | | Eₐ |
| 2919 | E₁ₐE₂E₃EᵢᵢᵢE₄ | AlkLEᵥᵢᵢ | | Eₐ |
| 2920 | E_{1b}E₂E₃EᵢᵢᵢE₄ | AlkLEᵥᵢᵢ | | Eₐ |
| 2921 | E₁ₐE₂Eᵢᵥ | AlkLEᵥᵢᵢ | | Eₐ |
| 2922 | E_{1b}E₂Eᵢᵥ | AlkLEᵥᵢᵢ | | Eₐ |
| 2923 | E₁ₐE₂E₃Eᵢᵥ | AlkLEᵥᵢᵢ | | Eₐ |
| 2924 | E_{1b}E₂E₃Eᵢᵥ | AlkLEᵥᵢᵢ | | Eₐ |
| 2925 | E₁ₐE₂EᵢᵥE₄ | AlkLEᵥᵢᵢ | | Eₐ |
| 2926 | E_{1b}E₂EᵢᵥE₄ | AlkLEᵥᵢᵢ | | Eₐ |
| 2927 | E₁ₐE₂E₃EᵢᵥE₄ | AlkLEᵥᵢᵢ | | Eₐ |
| 2928 | E_{1b}E₂E₃EᵢᵥE₄ | AlkLEᵥᵢᵢ | | Eₐ |
| 2929 | E₁ₐE₂ | AlkLEᵥᵢᵢ | E₄* | Eₐ |
| 2930 | E_{1b}E₂ | AlkLEᵥᵢᵢ | E₄* | Eₐ |
| 2931 | E₁ₐE₂E₃ | AlkLEᵥᵢᵢ | E₄* | Eₐ |
| 2932 | E_{1b}E₂E₃ | AlkLEᵥᵢᵢ | E₄* | Eₐ |
| 2933 | E₁ₐE₂Eᵢ | AlkLEᵥᵢᵢ | E₄* | Eₐ |
| 2934 | E_{1b}E₂Eᵢ | AlkLEᵥᵢᵢ | E₄* | Eₐ |
| 2935 | E₁ₐE₂Eᵢᵢ | AlkLEᵥᵢᵢ | E₄* | Eₐ |
| 2936 | E_{1b}E₂Eᵢᵢ | AlkLEᵥᵢᵢ | E₄* | Eₐ |
| 2937 | E₁ₐE₂EᵢᵢE_{iib} | AlkLEᵥᵢᵢ | E₄* | Eₐ |
| 2938 | E_{1b}E₂EᵢᵢE_{iib} | AlkLEᵥᵢᵢ | E₄* | Eₐ |
| 2939 | E₁ₐE₂E₃Eᵢ | AlkLEᵥᵢᵢ | E₄* | Eₐ |
| 2940 | E_{1b}E₂E₃Eᵢ | AlkLEᵥᵢᵢ | E₄* | Eₐ |
| 2941 | E₁ₐE₂E₃Eᵢᵢ | AlkLEᵥᵢᵢ | E₄* | Eₐ |
| 2942 | E_{1b}E₂E₃Eᵢᵢ | AlkLEᵥᵢᵢ | E₄* | Eₐ |
| 2943 | E₁ₐE₂E₃EᵢᵢE_{iib} | AlkLEᵥᵢᵢ | E₄* | Eₐ |
| 2944 | E_{1b}E₂E₃EᵢᵢE_{iib} | AlkLEᵥᵢᵢ | E₄* | Eₐ |
| 2945 | E₁ₐE₂E₄ | AlkLEᵥᵢᵢ | E₄* | Eₐ |
| 2946 | E_{1b}E₂E₄ | AlkLEᵥᵢᵢ | E₄* | Eₐ |
| 2947 | E₁ₐE₂E₃E₄ | AlkLEᵥᵢᵢ | E₄* | Eₐ |
| 2948 | E_{1b}E₂E₃E₄ | AlkLEᵥᵢᵢ | E₄* | Eₐ |
| 2949 | E₁ₐE₂EᵢE₄ | AlkLEᵥᵢᵢ | E₄* | Eₐ |
| 2950 | E_{1b}E₂EᵢE₄ | AlkLEᵥᵢᵢ | E₄* | Eₐ |
| 2951 | E₁ₐE₂EᵢᵢE₄ | AlkLEᵥᵢᵢ | E₄* | Eₐ |
| 2952 | E_{1b}E₂EᵢᵢE₄ | AlkLEᵥᵢᵢ | E₄* | Eₐ |
| 2953 | E₁ₐE₂EᵢᵢE_{iib}E₄ | AlkLEᵥᵢᵢ | E₄* | Eₐ |
| 2954 | E_{1b}E₂EᵢᵢE_{iib}E₄ | AlkLEᵥᵢᵢ | E₄* | Eₐ |
| 2955 | E₁ₐE₂E₃EᵢE₄ | AlkLEᵥᵢᵢ | E₄* | Eₐ |
| 2956 | E_{1b}E₂E₃EᵢE₄ | AlkLEᵥᵢᵢ | E₄* | Eₐ |
| 2957 | E₁ₐE₂E₃EᵢᵢE₄ | AlkLEᵥᵢᵢ | E₄* | Eₐ |
| 2958 | E_{1b}E₂E₃EᵢᵢE₄ | AlkLEᵥᵢᵢ | E₄* | Eₐ |
| 2959 | E₁ₐE₂E₃EᵢᵢE_{iib}E₄ | AlkLEᵥᵢᵢ | E₄* | Eₐ |
| 2960 | E_{1b}E₂E₃EᵢᵢE_{iib}E₄ | AlkLEᵥᵢᵢ | E₄* | Eₐ |
| 2961 | E₁ₐE₂Eᵢᵢᵢ | AlkLEᵥᵢᵢ | E₄* | Eₐ |
| 2962 | E_{1b}E₂Eᵢᵢᵢ | AlkLEᵥᵢᵢ | E₄* | Eₐ |
| 2963 | E₁ₐE₂E₃Eᵢᵢᵢ | AlkLEᵥᵢᵢ | E₄* | Eₐ |
| 2964 | E_{1b}E₂E₃Eᵢᵢᵢ | AlkLEᵥᵢᵢ | E₄* | Eₐ |
| 2965 | E₁ₐE₂EᵢᵢᵢE₄ | AlkLEᵥᵢᵢ | E₄* | Eₐ |
| 2966 | E_{1b}E₂EᵢᵢᵢE₄ | AlkLEᵥᵢᵢ | E₄* | Eₐ |
| 2967 | E₁ₐE₂E₃EᵢᵢᵢE₄ | AlkLEᵥᵢᵢ | E₄* | Eₐ |
| 2968 | E_{1b}E₂E₃EᵢᵢᵢE₄ | AlkLEᵥᵢᵢ | E₄* | Eₐ |
| 2969 | E₁ₐE₂Eᵢᵥ | AlkLEᵥᵢᵢ | E₄* | Eₐ |
| 2970 | E_{1b}E₂Eᵢᵥ | AlkLEᵥᵢᵢ | E₄* | Eₐ |
| 2971 | E₁ₐE₂E₃Eᵢᵥ | AlkLEᵥᵢᵢ | E₄* | Eₐ |
| 2972 | E_{1b}E₂E₃Eᵢᵥ | AlkLEᵥᵢᵢ | E₄* | Eₐ |
| 2973 | E₁ₐE₂EᵢᵥE₄ | AlkLEᵥᵢᵢ | E₄* | Eₐ |
| 2974 | E_{1b}E₂EᵢᵥE₄ | AlkLEᵥᵢᵢ | E₄* | Eₐ |
| 2975 | E₁ₐE₂E₃EᵢᵥE₄ | AlkLEᵥᵢᵢ | E₄* | Eₐ |
| 2976 | E_{1b}E₂E₃EᵢᵥE₄ | AlkLEᵥᵢᵢ | E₄* | Eₐ |
| 2977 | E₁ₐE₂ | AlkLEᵥᵢᵢ | E₅ | Eₐ |
| 2978 | E_{1b}E₂ | AlkLEᵥᵢᵢ | E₅ | Eₐ |
| 2979 | E₁ₐE₂E₃ | AlkLEᵥᵢᵢ | E₅ | Eₐ |
| 2980 | E_{1b}E₂E₃ | AlkLEᵥᵢᵢ | E₅ | Eₐ |
| 2981 | E₁ₐE₂Eᵢ | AlkLEᵥᵢᵢ | E₅ | Eₐ |
| 2982 | E_{1b}E₂Eᵢ | AlkLEᵥᵢᵢ | E₅ | Eₐ |
| 2983 | E₁ₐE₂Eᵢᵢ | AlkLEᵥᵢᵢ | E₅ | Eₐ |
| 2984 | E_{1b}E₂Eᵢᵢ | AlkLEᵥᵢᵢ | E₅ | Eₐ |
| 2985 | E₁ₐE₂EᵢᵢE_{iib} | AlkLEᵥᵢᵢ | E₅ | Eₐ |
| 2986 | E_{1b}E₂EᵢᵢE_{iib} | AlkLEᵥᵢᵢ | E₅ | Eₐ |
| 2987 | E₁ₐE₂E₃Eᵢ | AlkLEᵥᵢᵢ | E₅ | Eₐ |
| 2988 | E_{1b}E₂E₃Eᵢ | AlkLEᵥᵢᵢ | E₅ | Eₐ |
| 2989 | E₁ₐE₂E₃Eᵢᵢ | AlkLEᵥᵢᵢ | E₅ | Eₐ |
| 2990 | E_{1b}E₂E₃Eᵢᵢ | AlkLEᵥᵢᵢ | E₅ | Eₐ |
| 2991 | E₁ₐE₂E₃EᵢᵢE_{iib} | AlkLEᵥᵢᵢ | E₅ | Eₐ |
| 2992 | E_{1b}E₂E₃EᵢᵢE_{iib} | AlkLEᵥᵢᵢ | E₅ | Eₐ |
| 2993 | E₁ₐE₂E₄ | AlkLEᵥᵢᵢ | E₅ | Eₐ |
| 2994 | E_{1b}E₂E₄ | AlkLEᵥᵢᵢ | E₅ | Eₐ |
| 2995 | E₁ₐE₂E₃E₄ | AlkLEᵥᵢᵢ | E₅ | Eₐ |
| 2996 | E_{1b}E₂E₃E₄ | AlkLEᵥᵢᵢ | E₅ | Eₐ |
| 2997 | E₁ₐE₂EᵢE₄ | AlkLEᵥᵢᵢ | E₅ | Eₐ |
| 2998 | E_{1b}E₂EᵢE₄ | AlkLEᵥᵢᵢ | E₅ | Eₐ |
| 2999 | E₁ₐE₂EᵢᵢE₄ | AlkLEᵥᵢᵢ | E₅ | Eₐ |
| 3000 | E_{1b}E₂EᵢᵢE₄ | AlkLEᵥᵢᵢ | E₅ | Eₐ |
| 3001 | E₁ₐE₂EᵢᵢE_{iib}E₄ | AlkLEᵥᵢᵢ | E₅ | Eₐ |
| 3002 | E_{1b}E₂EᵢᵢE_{iib}E₄ | AlkLEᵥᵢᵢ | E₅ | Eₐ |
| 3003 | E₁ₐE₂E₃EᵢE₄ | AlkLEᵥᵢᵢ | E₅ | Eₐ |
| 3004 | E_{1b}E₂E₃EᵢE₄ | AlkLEᵥᵢᵢ | E₅ | Eₐ |
| 3005 | E₁ₐE₂E₃EᵢᵢE₄ | AlkLEᵥᵢᵢ | E₅ | Eₐ |
| 3006 | E_{1b}E₂E₃EᵢᵢE₄ | AlkLEᵥᵢᵢ | E₅ | Eₐ |
| 3007 | E₁ₐE₂E₃EᵢᵢE_{iib}E₄ | AlkLEᵥᵢᵢ | E₅ | Eₐ |
| 3008 | E_{1b}E₂E₃EᵢᵢE_{iib}E₄ | AlkLEᵥᵢᵢ | E₅ | Eₐ |
| 3009 | E₁ₐE₂Eᵢᵢᵢ | AlkLEᵥᵢᵢ | E₅ | Eₐ |
| 3010 | E_{1b}E₂Eᵢᵢᵢ | AlkLEᵥᵢᵢ | E₅ | Eₐ |
| 3011 | E₁ₐE₂E₃Eᵢᵢᵢ | AlkLEᵥᵢᵢ | E₅ | Eₐ |
| 3012 | E_{1b}E₂E₃Eᵢᵢᵢ | AlkLEᵥᵢᵢ | E₅ | Eₐ |
| 3013 | E₁ₐE₂EᵢᵢᵢE₄ | AlkLEᵥᵢᵢ | E₅ | Eₐ |
| 3014 | E_{1b}E₂EᵢᵢᵢE₄ | AlkLEᵥᵢᵢ | E₅ | Eₐ |
| 3015 | E₁ₐE₂E₃EᵢᵢᵢE₄ | AlkLEᵥᵢᵢ | E₅ | Eₐ |
| 3016 | E_{1b}E₂E₃EᵢᵢᵢE₄ | AlkLEᵥᵢᵢ | E₅ | Eₐ |
| 3017 | E₁ₐE₂Eᵢᵥ | AlkLEᵥᵢᵢ | E₅ | Eₐ |
| 3018 | E_{1b}E₂Eᵢᵥ | AlkLEᵥᵢᵢ | E₅ | Eₐ |
| 3019 | E₁ₐE₂E₃Eᵢᵥ | AlkLEᵥᵢᵢ | E₅ | Eₐ |
| 3020 | E_{1b}E₂E₃Eᵢᵥ | AlkLEᵥᵢᵢ | E₅ | Eₐ |
| 3021 | E₁ₐE₂EᵢᵥE₄ | AlkLEᵥᵢᵢ | E₅ | Eₐ |
| 3022 | E_{1b}E₂EᵢᵥE₄ | AlkLEᵥᵢᵢ | E₅ | Eₐ |
| 3023 | E₁ₐE₂E₃EᵢᵥE₄ | AlkLEᵥᵢᵢ | E₅ | Eₐ |
| 3024 | E_{1b}E₂E₃EᵢᵥE₄ | AlkLEᵥᵢᵢ | E₅ | Eₐ |
| 3025 | E₁ₐE₂ | AlkLEᵥᵢᵢ | E₄*E₅ | Eₐ |
| 3026 | E_{1b}E₂ | AlkLEᵥᵢᵢ | E₄*E₅ | Eₐ |
| 3027 | E₁ₐE₂E₃ | AlkLEᵥᵢᵢ | E₄*E₅ | Eₐ |
| 3028 | E_{1b}E₂E₃ | AlkLEᵥᵢᵢ | E₄*E₅ | Eₐ |
| 3029 | E₁ₐE₂Eᵢ | AlkLEᵥᵢᵢ | E₄*E₅ | Eₐ |
| 3030 | E_{1b}E₂Eᵢ | AlkLEᵥᵢᵢ | E₄*E₅ | Eₐ |
| 3031 | E₁ₐE₂Eᵢᵢ | AlkLEᵥᵢᵢ | E₄*E₅ | Eₐ |
| 3032 | E_{1b}E₂Eᵢᵢ | AlkLEᵥᵢᵢ | E₄*E₅ | Eₐ |
| 3033 | E₁ₐE₂EᵢᵢE_{iib} | AlkLEᵥᵢᵢ | E₄*E₅ | Eₐ |
| 3034 | E_{1b}E₂EᵢᵢE_{iib} | AlkLEᵥᵢᵢ | E₄*E₅ | Eₐ |
| 3035 | E₁ₐE₂E₃Eᵢ | AlkLEᵥᵢᵢ | E₄*E₅ | Eₐ |
| 3036 | E_{1b}E₂E₃Eᵢ | AlkLEᵥᵢᵢ | E₄*E₅ | Eₐ |
| 3037 | E₁ₐE₂E₃Eᵢᵢ | AlkLEᵥᵢᵢ | E₄*E₅ | Eₐ |
| 3038 | E_{1b}E₂E₃Eᵢᵢ | AlkLEᵥᵢᵢ | E₄*E₅ | Eₐ |
| 3039 | E₁ₐE₂E₃EᵢᵢE_{iib} | AlkLEᵥᵢᵢ | E₄*E₅ | Eₐ |
| 3040 | E_{1b}E₂E₃EᵢᵢE_{iib} | AlkLEᵥᵢᵢ | E₄*E₅ | Eₐ |
| 3041 | E₁ₐE₂E₄ | AlkLEᵥᵢᵢ | E₄*E₅ | Eₐ |
| 3042 | E_{1b}E₂E₄ | AlkLEᵥᵢᵢ | E₄*E₅ | Eₐ |
| 3043 | E₁ₐE₂E₃E₄ | AlkLEᵥᵢᵢ | E₄*E₅ | Eₐ |
| 3044 | E_{1b}E₂E₃E₄ | AlkLEᵥᵢᵢ | E₄*E₅ | Eₐ |
| 3045 | E₁ₐE₂EᵢE₄ | AlkLEᵥᵢᵢ | E₄*E₅ | Eₐ |
| 3046 | E_{1b}E₂EᵢE₄ | AlkLEᵥᵢᵢ | E₄*E₅ | Eₐ |
| 3047 | E₁ₐE₂EᵢᵢE₄ | AlkLEᵥᵢᵢ | E₄*E₅ | Eₐ |
| 3048 | E_{1b}E₂EᵢᵢE₄ | AlkLEᵥᵢᵢ | E₄*E₅ | Eₐ |
| 3049 | E₁ₐE₂EᵢᵢE_{iib}E₄ | AlkLEᵥᵢᵢ | E₄*E₅ | Eₐ |
| 3050 | E_{1b}E₂EᵢᵢE_{iib}E₄ | AlkLEᵥᵢᵢ | E₄*E₅ | Eₐ |
| 3051 | E₁ₐE₂E₃EᵢE₄ | AlkLEᵥᵢᵢ | E₄*E₅ | Eₐ |
| 3052 | E_{1b}E₂E₃EᵢE₄ | AlkLEᵥᵢᵢ | E₄*E₅ | Eₐ |
| 3053 | E₁ₐE₂E₃EᵢᵢE₄ | AlkLEᵥᵢᵢ | E₄*E₅ | Eₐ |
| 3054 | E_{1b}E₂E₃EᵢᵢE₄ | AlkLEᵥᵢᵢ | E₄*E₅ | Eₐ |
| 3055 | E₁ₐE₂E₃EᵢᵢE_{iib}E₄ | AlkLEᵥᵢᵢ | E₄*E₅ | Eₐ |
| 3056 | E_{1b}E₂E₃EᵢᵢE_{iib}E₄ | AlkLEᵥᵢᵢ | E₄*E₅ | Eₐ |
| 3057 | E₁ₐE₂Eᵢᵢᵢ | AlkLEᵥᵢᵢ | E₄*E₅ | Eₐ |
| 3058 | E_{1b}E₂Eᵢᵢᵢ | AlkLEᵥᵢᵢ | E₄*E₅ | Eₐ |
| 3059 | E₁ₐE₂E₃Eᵢᵢᵢ | AlkLEᵥᵢᵢ | E₄*E₅ | Eₐ |
| 3060 | E_{1b}E₂E₃Eᵢᵢᵢ | AlkLEᵥᵢᵢ | E₄*E₅ | Eₐ |
| 3061 | E₁ₐE₂EᵢᵢᵢE₄ | AlkLEᵥᵢᵢ | E₄*E₅ | Eₐ |
| 3062 | E_{1b}E₂EᵢᵢᵢE₄ | AlkLEᵥᵢᵢ | E₄*E₅ | Eₐ |
| 3063 | E₁ₐE₂E₃EᵢᵢᵢE₄ | AlkLEᵥᵢᵢ | E₄*E₅ | Eₐ |
| 3064 | E_{1b}E₂E₃EᵢᵢᵢE₄ | AlkLEᵥᵢᵢ | E₄*E₅ | Eₐ |
| 3065 | E₁ₐE₂Eᵢᵥ | AlkLEᵥᵢᵢ | E₄*E₅ | Eₐ |
| 3066 | E_{1b}E₂Eᵢᵥ | AlkLEᵥᵢᵢ | E₄*E₅ | Eₐ |
| 3067 | E₁ₐE₂E₃Eᵢᵥ | AlkLEᵥᵢᵢ | E₄*E₅ | Eₐ |
| 3068 | E_{1b}E₂E₃Eᵢᵥ | AlkLEᵥᵢᵢ | E₄*E₅ | Eₐ |
| 3069 | E₁ₐE₂EᵢᵥE₄ | AlkLEᵥᵢᵢ | E₄*E₅ | Eₐ |
| 3070 | E_{1b}E₂EᵢᵥE₄ | AlkLEᵥᵢᵢ | E₄*E₅ | Eₐ |
| 3071 | E₁ₐE₂E₃EᵢᵥE₄ | AlkLEᵥᵢᵢ | E₄*E₅ | Eₐ |
| 3072 | E_{1b}E₂E₃EᵢᵥE₄ | AlkLEᵥᵢᵢ | E₄*E₅ | Eₐ |
| 3073 | E₁ₐE₂ | Eᵥᵢᵢ | | E_{b} |
| 3074 | E_{1b}E₂ | Eᵥᵢᵢ | | E_{b} |
| 3075 | E₁ₐE₂E₃ | Eᵥᵢᵢ | | E_{b} |
| 3076 | E_{1b}E₂E₃ | Eᵥᵢᵢ | | E_{b} |
| 3077 | E₁ₐE₂Eᵢ | Eᵥᵢᵢ | | E_{b} |
| 3078 | E_{1b}E₂Eᵢ | Eᵥᵢᵢ | | E_{b} |
| 3079 | E₁ₐE₂Eᵢᵢ | Eᵥᵢᵢ | | E_{b} |
| 3080 | E_{1b}E₂Eᵢᵢ | Eᵥᵢᵢ | | E_{b} |
| 3081 | E₁ₐE₂EᵢᵢE_{iib} | Eᵥᵢᵢ | | E_{b} |
| 3082 | E_{1b}E₂EᵢᵢE_{iib} | Eᵥᵢᵢ | | E_{b} |
| 3083 | E₁ₐE₂E₃Eᵢ | Eᵥᵢᵢ | | E_{b} |
| 3084 | E_{1b}E₂E₃Eᵢ | Eᵥᵢᵢ | | E_{b} |
| 3085 | E₁ₐE₂E₃Eᵢᵢ | Eᵥᵢᵢ | | E_{b} |
| 3086 | E_{1b}E₂E₃Eᵢᵢ | Eᵥᵢᵢ | | E_{b} |
| 3087 | E₁ₐE₂E₃EᵢᵢE_{iib} | Eᵥᵢᵢ | | E_{b} |
| 3088 | E_{1b}E₂E₃EᵢᵢE_{iib} | Eᵥᵢᵢ | | E_{b} |
| 3089 | E₁ₐE₂E₄ | Eᵥᵢᵢ | | E_{b} |
| 3090 | E_{1b}E₂E₄ | Eᵥᵢᵢ | | E_{b} |
| 3091 | E₁ₐE₂E₃E₄ | Eᵥᵢᵢ | | E_{b} |
| 3092 | E_{1b}E₂E₃E₄ | Eᵥᵢᵢ | | E_{b} |
| 3093 | E₁ₐE₂EᵢE₄ | Eᵥᵢᵢ | | E_{b} |
| 3094 | E_{1b}E₂EᵢE₄ | Eᵥᵢᵢ | | E_{b} |
| 3095 | E₁ₐE₂EᵢᵢE₄ | Eᵥᵢᵢ | | E_{b} |
| 3096 | E_{1b}E₂EᵢᵢE₄ | Eᵥᵢᵢ | | E_{b} |
| 3097 | E₁ₐE₂EᵢᵢE_{iib}E₄ | Eᵥᵢᵢ | | E_{b} |
| 3098 | E_{1b}E₂EᵢᵢE_{iib}E₄ | Eᵥᵢᵢ | | E_{b} |
| 3099 | E₁ₐE₂E₃EᵢE₄ | Eᵥᵢᵢ | | E_{b} |
| 3100 | E_{1b}E₂E₃EᵢE₄ | Eᵥᵢᵢ | | E_{b} |
| 3101 | E₁ₐE₂E₃EᵢᵢE₄ | Eᵥᵢᵢ | | E_{b} |
| 3102 | E_{1b}E₂E₃EᵢᵢE₄ | Eᵥᵢᵢ | | E_{b} |
| 3103 | E₁ₐE₂E₃EᵢᵢE_{iib}E₄ | Eᵥᵢᵢ | | E_{b} |
| 3104 | E_{1b}E₂E₃EᵢᵢE_{iib}E₄ | Eᵥᵢᵢ | | E_{b} |
| 3105 | E₁ₐE₂Eᵢᵢᵢ | Eᵥᵢᵢ | | E_{b} |
| 3106 | E_{1b}E₂Eᵢᵢᵢ | Eᵥᵢᵢ | | E_{b} |
| 3107 | E₁ₐE₂E₃Eᵢᵢᵢ | Eᵥᵢᵢ | | E_{b} |
| 3108 | E_{1b}E₂E₃Eᵢᵢᵢ | Eᵥᵢᵢ | | E_{b} |
| 3109 | E₁ₐE₂EᵢᵢᵢE₄ | Eᵥᵢᵢ | | E_{b} |
| 3110 | E_{1b}E₂EᵢᵢᵢE₄ | Eᵥᵢᵢ | | E_{b} |
| 3111 | E₁ₐE₂E₃EᵢᵢᵢE₄ | Eᵥᵢᵢ | | E_{b} |
| 3112 | E_{1b}E₂E₃EᵢᵢᵢE₄ | Eᵥᵢᵢ | | E_{b} |
| 3113 | E₁ₐE₂Eᵢᵥ | Eᵥᵢᵢ | | E_{b} |
| 3114 | E_{1b}E₂Eᵢᵥ | Eᵥᵢᵢ | | E_{b} |
| 3115 | E₁ₐE₂E₃Eᵢᵥ | Eᵥᵢᵢ | | E_{b} |
| 3116 | E_{1b}E₂E₃Eᵢᵥ | Eᵥᵢᵢ | | E_{b} |
| 3117 | E₁ₐE₂EᵢᵥE₄ | Eᵥᵢᵢ | | E_{b} |
| 3118 | E_{1b}E₂EᵢᵥE₄ | Eᵥᵢᵢ | | E_{b} |
| 3119 | E₁ₐE₂E₃EᵢᵥE₄ | Eᵥᵢᵢ | | E_{b} |
| 3120 | E_{1b}E₂E₃EᵢᵥE₄ | Eᵥᵢᵢ | | E_{b} |
| 3121 | E₁ₐE₂ | Eᵥᵢᵢ | E₄* | E_{b} |
| 3122 | E_{1b}E₂ | Eᵥᵢᵢ | E₄* | E_{b} |
| 3123 | E₁ₐE₂E₃ | Eᵥᵢᵢ | E₄* | E_{b} |
| 3124 | E_{1b}E₂E₃ | Eᵥᵢᵢ | E₄* | E_{b} |
| 3125 | E₁ₐE₂Eᵢ | Eᵥᵢᵢ | E₄* | E_{b} |
| 3126 | E_{1b}E₂Eᵢ | Eᵥᵢᵢ | E₄* | E_{b} |
| 3127 | E₁ₐE₂Eᵢᵢ | Eᵥᵢᵢ | E₄* | E_{b} |
| 3128 | E_{1b}E₂Eᵢᵢ | Eᵥᵢᵢ | E₄* | E_{b} |
| 3129 | E₁ₐE₂EᵢᵢE_{iib} | Eᵥᵢᵢ | E₄* | E_{b} |
| 3130 | E_{1b}E₂EᵢᵢE_{iib} | Eᵥᵢᵢ | E₄* | E_{b} |
| 3131 | E₁ₐE₂E₃Eᵢ | Eᵥᵢᵢ | E₄* | E_{b} |
| 3132 | E_{1b}E₂E₃Eᵢ | Eᵥᵢᵢ | E₄* | E_{b} |
| 3133 | E₁ₐE₂E₃Eᵢᵢ | Eᵥᵢᵢ | E₄* | E_{b} |
| 3134 | E_{1b}E₂E₃Eᵢᵢ | Eᵥᵢᵢ | E₄* | E_{b} |
| 3135 | E₁ₐE₂E₃EᵢᵢE_{iib} | Eᵥᵢᵢ | E₄* | E_{b} |
| 3136 | E_{1b}E₂E₃EᵢᵢE_{iib} | Eᵥᵢᵢ | E₄* | E_{b} |
| 3137 | E₁ₐE₂E₄ | Eᵥᵢᵢ | E₄* | E_{b} |
| 3138 | E_{1b}E₂E₄ | Eᵥᵢᵢ | E₄* | E_{b} |
| 3139 | E₁ₐE₂E₃E₄ | Eᵥᵢᵢ | E₄* | E_{b} |
| 3140 | E_{1b}E₂E₃E₄ | Eᵥᵢᵢ | E₄* | E_{b} |
| 3141 | E₁ₐE₂EᵢE₄ | Eᵥᵢᵢ | E₄* | E_{b} |
| 3142 | E_{1b}E₂EᵢE₄ | Eᵥᵢᵢ | E₄* | E_{b} |
| 3143 | E₁ₐE₂EᵢᵢE₄ | Eᵥᵢᵢ | E₄* | E_{b} |
| 3144 | E_{1b}E₂EᵢᵢE₄ | Eᵥᵢᵢ | E₄* | E_{b} |
| 3145 | E₁ₐE₂EᵢᵢE_{iib}E₄ | Eᵥᵢᵢ | E₄* | E_{b} |
| 3146 | E_{1b}E₂EᵢᵢE_{iib}E₄ | Eᵥᵢᵢ | E₄* | E_{b} |
| 3147 | E₁ₐE₂E₃EᵢE₄ | Eᵥᵢᵢ | E₄* | E_{b} |
| 3148 | E_{1b}E₂E₃EᵢE₄ | Eᵥᵢᵢ | E₄* | E_{b} |
| 3149 | E₁ₐE₂E₃EᵢᵢE₄ | Eᵥᵢᵢ | E₄* | E_{b} |
| 3150 | E_{1b}E₂E₃EᵢᵢE₄ | Eᵥᵢᵢ | E₄* | E_{b} |
| 3151 | E₁ₐE₂E₃EᵢᵢE_{iib}E₄ | Eᵥᵢᵢ | E₄* | E_{b} |
| 3152 | E_{1b}E₂E₃EᵢᵢE_{iib}E₄ | Eᵥᵢᵢ | E₄* | E_{b} |
| 3153 | E₁ₐE₂Eᵢᵢᵢ | Eᵥᵢᵢ | E₄* | E_{b} |
| 3154 | E_{1b}E₂Eᵢᵢᵢ | Eᵥᵢᵢ | E₄* | E_{b} |
| 3155 | E₁ₐE₂E₃Eᵢᵢᵢ | Eᵥᵢᵢ | E₄* | E_{b} |
| 3156 | E_{1b}E₂E₃Eᵢᵢᵢ | Eᵥᵢᵢ | E₄* | E_{b} |
| 3157 | E₁ₐE₂EᵢᵢᵢE₄ | Eᵥᵢᵢ | E₄* | E_{b} |
| 3158 | E_{1b}E₂EᵢᵢᵢE₄ | Eᵥᵢᵢ | E₄* | E_{b} |
| 3159 | E₁ₐE₂E₃EᵢᵢᵢE₄ | Eᵥᵢᵢ | E₄* | E_{b} |
| 3160 | E_{1b}E₂E₃EᵢᵢᵢE₄ | Eᵥᵢᵢ | E₄* | E_{b} |
| 3161 | E₁ₐE₂Eᵢᵥ | Eᵥᵢᵢ | E₄* | E_{b} |
| 3162 | E_{1b}E₂Eᵢᵥ | Eᵥᵢᵢ | E₄* | E_{b} |
| 3163 | E₁ₐE₂E₃Eᵢᵥ | Eᵥᵢᵢ | E₄* | E_{b} |
| 3164 | E_{1b}E₂E₃Eᵢᵥ | Eᵥᵢᵢ | E₄* | E_{b} |
| 3165 | E₁ₐE₂EᵢᵥE₄ | Eᵥᵢᵢ | E₄* | E_{b} |
| 3166 | E_{1b}E₂EᵢᵥE₄ | Eᵥᵢᵢ | E₄* | E_{b} |
| 3167 | E₁ₐE₂E₃EᵢᵥE₄ | Eᵥᵢᵢ | E₄* | E_{b} |
| 3168 | E_{1b}E₂E₃EᵢᵥE₄ | Eᵥᵢᵢ | E₄* | E_{b} |
| 3169 | E₁ₐE₂ | Eᵥᵢᵢ | E₅ | E_{b} |
| 3170 | E_{1b}E₂ | Eᵥᵢᵢ | E₅ | E_{b} |
| 3171 | E₁ₐE₂E₃ | Eᵥᵢᵢ | E₅ | E_{b} |
| 3172 | E_{1b}E₂E₃ | Eᵥᵢᵢ | E₅ | E_{b} |
| 3173 | E₁ₐE₂Eᵢ | Eᵥᵢᵢ | E₅ | E_{b} |
| 3174 | E_{1b}E₂Eᵢ | Eᵥᵢᵢ | E₅ | E_{b} |
| 3175 | E₁ₐE₂Eᵢᵢ | Eᵥᵢᵢ | E₅ | E_{b} |
| 3176 | E_{1b}E₂Eᵢᵢ | Eᵥᵢᵢ | E₅ | E_{b} |
| 3177 | E₁ₐE₂EᵢᵢE_{iib} | Eᵥᵢᵢ | E₅ | E_{b} |
| 3178 | E_{1b}E₂EᵢᵢE_{iib} | Eᵥᵢᵢ | E₅ | E_{b} |
| 3179 | E₁ₐE₂E₃Eᵢ | Eᵥᵢᵢ | E₅ | E_{b} |
| 3180 | E_{1b}E₂E₃Eᵢ | Eᵥᵢᵢ | E₅ | E_{b} |
| 3181 | E₁ₐE₂E₃Eᵢᵢ | Eᵥᵢᵢ | E₅ | E_{b} |
| 3182 | E_{1b}E₂E₃Eᵢᵢ | Eᵥᵢᵢ | E₅ | E_{b} |
| 3183 | E₁ₐE₂E₃EᵢᵢE_{iib} | Eᵥᵢᵢ | E₅ | E_{b} |
| 3184 | E_{1b}E₂E₃EᵢᵢE_{iib} | Eᵥᵢᵢ | E₅ | E_{b} |
| 3185 | E₁ₐE₂E₄ | Eᵥᵢᵢ | E₅ | E_{b} |
| 3186 | E_{1b}E₂E₄ | Eᵥᵢᵢ | E₅ | E_{b} |
| 3187 | E₁ₐE₂E₃E₄ | Eᵥᵢᵢ | E₅ | E_{b} |
| 3188 | E_{1b}E₂E₃E₄ | Eᵥᵢᵢ | E₅ | E_{b} |
| 3189 | E₁ₐE₂EᵢE₄ | Eᵥᵢᵢ | E₅ | E_{b} |
| 3190 | E_{1b}E₂EᵢE₄ | Eᵥᵢᵢ | E₅ | E_{b} |
| 3191 | E₁ₐE₂EᵢᵢE₄ | Eᵥᵢᵢ | E₅ | E_{b} |
| 3192 | E_{1b}E₂EᵢᵢE₄ | Eᵥᵢᵢ | E₅ | E_{b} |
| 3193 | E₁ₐE₂EᵢᵢE_{iib}E₄ | Eᵥᵢᵢ | E₅ | E_{b} |
| 3194 | E_{1b}E₂EᵢᵢE_{iib}E₄ | Eᵥᵢᵢ | E₅ | E_{b} |
| 3195 | E₁ₐE₂E₃EᵢE₄ | Eᵥᵢᵢ | E₅ | E_{b} |
| 3196 | E_{1b}E₂E₃EᵢE₄ | Eᵥᵢᵢ | E₅ | E_{b} |
| 3197 | E₁ₐE₂E₃EᵢᵢE₄ | Eᵥᵢᵢ | E₅ | E_{b} |
| 3198 | E_{1b}E₂E₃EᵢᵢE₄ | Eᵥᵢᵢ | E₅ | E_{b} |
| 3199 | E₁ₐE₂E₃EᵢᵢE_{iib}E₄ | Eᵥᵢᵢ | E₅ | E_{b} |
| 3200 | E_{1b}E₂E₃EᵢᵢE_{iib}E₄ | Eᵥᵢᵢ | E₅ | E_{b} |
| 3201 | E₁ₐE₂Eᵢᵢᵢ | Eᵥᵢᵢ | E₅ | E_{b} |
| 3202 | E_{1b}E₂Eᵢᵢᵢ | Eᵥᵢᵢ | E₅ | E_{b} |
| 3203 | E₁ₐE₂E₃Eᵢᵢᵢ | Eᵥᵢᵢ | E₅ | E_{b} |
| 3204 | E_{1b}E₂E₃Eᵢᵢᵢ | Eᵥᵢᵢ | E₅ | E_{b} |
| 3205 | E₁ₐE₂EᵢᵢᵢE₄ | Eᵥᵢᵢ | E₅ | E_{b} |
| 3206 | E_{1b}E₂EᵢᵢᵢE₄ | Eᵥᵢᵢ | E₅ | E_{b} |
| 3207 | E₁ₐE₂E₃EᵢᵢᵢE₄ | Eᵥᵢᵢ | E₅ | E_{b} |
| 3208 | E_{1b}E₂E₃EᵢᵢᵢE₄ | Eᵥᵢᵢ | E₅ | E_{b} |
| 3209 | E₁ₐE₂Eᵢᵥ | Eᵥᵢᵢ | E₅ | E_{b} |
| 3210 | E_{1b}E₂Eᵢᵥ | Eᵥᵢᵢ | E₅ | E_{b} |
| 3211 | E₁ₐE₂E₃Eᵢᵥ | Eᵥᵢᵢ | E₅ | E_{b} |
| 3212 | E_{1b}E₂E₃Eᵢᵥ | Eᵥᵢᵢ | E₅ | E_{b} |
| 3213 | E₁ₐE₂EᵢᵥE₄ | Eᵥᵢᵢ | E₅ | E_{b} |
| 3214 | E_{1b}E₂EᵢᵥE₄ | Eᵥᵢᵢ | E₅ | E_{b} |
| 3215 | E₁ₐE₂E₃EᵢᵥE₄ | Eᵥᵢᵢ | E₅ | E_{b} |
| 3216 | E_{1b}E₂E₃EᵢᵥE₄ | Eᵥᵢᵢ | E₅ | E_{b} |
| 3217 | E₁ₐE₂ | Eᵥᵢᵢ | E₄*E₅ | E_{b} |
| 3218 | E_{1b}E₂ | Eᵥᵢᵢ | E₄*E₅ | E_{b} |
| 3219 | E₁ₐE₂E₃ | Eᵥᵢᵢ | E₄*E₅ | E_{b} |
| 3220 | E_{1b}E₂E₃ | Eᵥᵢᵢ | E₄*E₅ | E_{b} |
| 3221 | E₁ₐE₂Eᵢ | Eᵥᵢᵢ | E₄*E₅ | E_{b} |
| 3222 | E_{1b}E₂Eᵢ | Eᵥᵢᵢ | E₄*E₅ | E_{b} |
| 3223 | E₁ₐE₂Eᵢᵢ | Eᵥᵢᵢ | E₄*E₅ | E_{b} |
| 3224 | E_{1b}E₂Eᵢᵢ | Eᵥᵢᵢ | E₄*E₅ | E_{b} |
| 3225 | E₁ₐE₂EᵢᵢE_{iib} | Eᵥᵢᵢ | E₄*E₅ | E_{b} |
| 3226 | E_{1b}E₂EᵢᵢE_{iib} | Eᵥᵢᵢ | E₄*E₅ | E_{b} |
| 3227 | E₁ₐE₂E₃Eᵢ | Eᵥᵢᵢ | E₄*E₅ | E_{b} |
| 3228 | E_{1b}E₂E₃Eᵢ | Eᵥᵢᵢ | E₄*E₅ | E_{b} |
| 3229 | E₁ₐE₂E₃Eᵢᵢ | Eᵥᵢᵢ | E₄*E₅ | E_{b} |
| 3230 | E_{1b}E₂E₃Eᵢᵢ | Eᵥᵢᵢ | E₄*E₅ | E_{b} |
| 3231 | E₁ₐE₂E₃EᵢᵢE_{iib} | Eᵥᵢᵢ | E₄*E₅ | E_{b} |
| 3232 | E_{1b}E₂E₃EᵢᵢE_{iib} | Eᵥᵢᵢ | E₄*E₅ | E_{b} |
| 3233 | E₁ₐE₂E₄ | Eᵥᵢᵢ | E₄*E₅ | E_{b} |
| 3234 | E_{1b}E₂E₄ | Eᵥᵢᵢ | E₄*E₅ | E_{b} |
| 3235 | E₁ₐE₂E₃E₄ | Eᵥᵢᵢ | E₄*E₅ | E_{b} |
| 3236 | E_{1b}E₂E₃E₄ | Eᵥᵢᵢ | E₄*E₅ | E_{b} |
| 3237 | E₁ₐE₂EᵢE₄ | Eᵥᵢᵢ | E₄*E₅ | E_{b} |
| 3238 | E_{1b}E₂EᵢE₄ | Eᵥᵢᵢ | E₄*E₅ | E_{b} |
| 3239 | E₁ₐE₂EᵢᵢE₄ | Eᵥᵢᵢ | E₄*E₅ | E_{b} |
| 3240 | E_{1b}E₂EᵢᵢE₄ | Eᵥᵢᵢ | E₄*E₅ | E_{b} |
| 3241 | E₁ₐE₂EᵢᵢE_{iib}E₄ | Eᵥᵢᵢ | E₄*E₅ | E_{b} |
| 3242 | E_{1b}E₂EᵢᵢE_{iib}E₄ | Eᵥᵢᵢ | E₄*E₅ | E_{b} |
| 3243 | E₁ₐE₂E₃EᵢE₄ | Eᵥᵢᵢ | E₄*E₅ | E_{b} |
| 3244 | E_{1b}E₂E₃EᵢE₄ | Eᵥᵢᵢ | E₄*E₅ | E_{b} |
| 3245 | E₁ₐE₂E₃EᵢᵢE₄ | Eᵥᵢᵢ | E₄*E₅ | E_{b} |
| 3246 | E_{1b}E₂E₃EᵢᵢE₄ | Eᵥᵢᵢ | E₄*E₅ | E_{b} |
| 3247 | E₁ₐE₂E₃EᵢᵢE_{iib}E₄ | Eᵥᵢᵢ | E₄*E₅ | E_{b} |
| 3248 | E_{1b}E₂E₃EᵢᵢE_{iib}E₄ | Eᵥᵢᵢ | E₄*E₅ | E_{b} |
| 3249 | E₁ₐE₂Eᵢᵢᵢ | Eᵥᵢᵢ | E₄*E₅ | E_{b} |
| 3250 | E_{1b}E₂Eᵢᵢᵢ | Eᵥᵢᵢ | E₄*E₅ | E_{b} |
| 3251 | E₁ₐE₂E₃Eᵢᵢᵢ | Eᵥᵢᵢ | E₄*E₅ | E_{b} |
| 3252 | E_{1b}E₂E₃Eᵢᵢᵢ | Eᵥᵢᵢ | E₄*E₅ | E_{b} |
| 3253 | E₁ₐE₂EᵢᵢᵢE₄ | Eᵥᵢᵢ | E₄*E₅ | E_{b} |
| 3254 | E_{1b}E₂EᵢᵢᵢE₄ | Eᵥᵢᵢ | E₄*E₅ | E_{b} |
| 3255 | E₁ₐE₂E₃EᵢᵢᵢE₄ | Eᵥᵢᵢ | E₄*E₅ | E_{b} |
| 3256 | E_{1b}E₂E₃EᵢᵢᵢE₄ | Eᵥᵢᵢ | E₄*E₅ | E_{b} |
| 3257 | E₁ₐE₂Eᵢᵥ | Eᵥᵢᵢ | E₄*E₅ | E_{b} |
| 3258 | E_{1b}E₂Eᵢᵥ | Eᵥᵢᵢ | E₄*E₅ | E_{b} |
| 3259 | E₁ₐE₂E₃Eᵢᵥ | Eᵥᵢᵢ | E₄*E₅ | E_{b} |
| 3260 | E_{1b}E₂E₃Eᵢᵥ | Eᵥᵢᵢ | E₄*E₅ | E_{b} |
| 3261 | E₁ₐE₂EᵢᵥE₄ | Eᵥᵢᵢ | E₄*E₅ | E_{b} |
| 3262 | E_{1b}E₂EᵢᵥE₄ | Eᵥᵢᵢ | E₄*E₅ | E_{b} |
| 3263 | E₁ₐE₂E₃EᵢᵥE₄ | Eᵥᵢᵢ | E₄*E₅ | E_{b} |
| 3264 | E_{1b}E₂E₃EᵢᵥE₄ | Eᵥᵢᵢ | E₄*E₅ | E_{b} |
| 3265 | E₁ₐE₂ | AlkLEᵥᵢᵢ | | E_{b} |
| 3266 | E_{1b}E₂ | AlkLEᵥᵢᵢ | | E_{b} |
| 3267 | E₁ₐE₂E₃ | AlkLEᵥᵢᵢ | | E_{b} |
| 3268 | E_{1b}E₂E₃ | AlkLEᵥᵢᵢ | | E_{b} |
| 3269 | E₁ₐE₂Eᵢ | AlkLEᵥᵢᵢ | | E_{b} |
| 3270 | E_{1b}E₂Eᵢ | AlkLEᵥᵢᵢ | | E_{b} |
| 3271 | E₁ₐE₂Eᵢᵢ | AlkLEᵥᵢᵢ | | E_{b} |
| 3272 | E_{1b}E₂Eᵢᵢ | AlkLEᵥᵢᵢ | | E_{b} |
| 3273 | E₁ₐE₂EᵢᵢE_{iib} | AlkLEᵥᵢᵢ | | E_{b} |
| 3274 | E_{1b}E₂EᵢᵢE_{iib} | AlkLEᵥᵢᵢ | | E_{b} |
| 3275 | E₁ₐE₂E₃Eᵢ | AlkLEᵥᵢᵢ | | E_{b} |
| 3276 | E_{1b}E₂E₃Eᵢ | AlkLEᵥᵢᵢ | | E_{b} |
| 3277 | E₁ₐE₂E₃Eᵢᵢ | AlkLEᵥᵢᵢ | | E_{b} |
| 3278 | E_{1b}E₂E₃Eᵢᵢ | AlkLEᵥᵢᵢ | | E_{b} |
| 3279 | E₁ₐE₂E₃EᵢᵢE_{iib} | AlkLEᵥᵢᵢ | | E_{b} |
| 3280 | E_{1b}E₂E₃EᵢᵢE_{iib} | AlkLEᵥᵢᵢ | | E_{b} |
| 3281 | E₁ₐE₂E₄ | AlkLEᵥᵢᵢ | | E_{b} |
| 3282 | E_{1b}E₂E₄ | AlkLEᵥᵢᵢ | | E_{b} |
| 3283 | E₁ₐE₂E₃E₄ | AlkLEᵥᵢᵢ | | E_{b} |
| 3284 | E_{1b}E₂E₃E₄ | AlkLEᵥᵢᵢ | | E_{b} |
| 3285 | E₁ₐE₂EᵢE₄ | AlkLEᵥᵢᵢ | | E_{b} |
| 3286 | E_{1b}E₂EᵢE₄ | AlkLEᵥᵢᵢ | | E_{b} |
| 3287 | E₁ₐE₂EᵢᵢE₄ | AlkLEᵥᵢᵢ | | E_{b} |
| 3288 | E_{1b}E₂EᵢᵢE₄ | AlkLEᵥᵢᵢ | | E_{b} |
| 3289 | E₁ₐE₂EᵢᵢE_{iib}E₄ | AlkLEᵥᵢᵢ | | E_{b} |
| 3290 | E_{1b}E₂EᵢᵢE_{iib}E₄ | AlkLEᵥᵢᵢ | | E_{b} |
| 3291 | E₁ₐE₂E₃EᵢE₄ | AlkLEᵥᵢᵢ | | E_{b} |
| 3292 | E_{1b}E₂E₃EᵢE₄ | AlkLEᵥᵢᵢ | | E_{b} |
| 3293 | E₁ₐE₂E₃EᵢᵢE₄ | AlkLEᵥᵢᵢ | | E_{b} |
| 3294 | E_{1b}E₂E₃EᵢᵢE₄ | AlkLEᵥᵢᵢ | | E_{b} |
| 3295 | E₁ₐE₂E₃EᵢᵢE_{iib}E₄ | AlkLEᵥᵢᵢ | | E_{b} |
| 3296 | E_{1b}E₂E₃EᵢᵢE_{iib}E₄ | AlkLEᵥᵢᵢ | | E_{b} |
| 3297 | E₁ₐE₂Eᵢᵢᵢ | AlkLEᵥᵢᵢ | | E_{b} |
| 3298 | E_{1b}E₂Eᵢᵢᵢ | AlkLEᵥᵢᵢ | | E_{b} |
| 3299 | E₁ₐE₂E₃Eᵢᵢᵢ | AlkLEᵥᵢᵢ | | E_{b} |
| 3300 | E_{1b}E₂E₃Eᵢᵢᵢ | AlkLEᵥᵢᵢ | | E_{b} |
| 3301 | E₁ₐE₂EᵢᵢᵢE₄ | AlkLEᵥᵢᵢ | | E_{b} |
| 3302 | E_{1b}E₂EᵢᵢᵢE₄ | AlkLEᵥᵢᵢ | | E_{b} |
| 3303 | E₁ₐE₂E₃EᵢᵢᵢE₄ | AlkLEᵥᵢᵢ | | E_{b} |
| 3304 | E_{1b}E₂E₃EᵢᵢᵢE₄ | AlkLEᵥᵢᵢ | | E_{b} |
| 3305 | E₁ₐE₂Eᵢᵥ | AlkLEᵥᵢᵢ | | E_{b} |
| 3306 | E_{1b}E₂Eᵢᵥ | AlkLEᵥᵢᵢ | | E_{b} |
| 3307 | E₁ₐE₂E₃Eᵢᵥ | AlkLEᵥᵢᵢ | | E_{b} |
| 3308 | E_{1b}E₂E₃Eᵢᵥ | AlkLEᵥᵢᵢ | | E_{b} |
| 3309 | E₁ₐE₂EᵢᵥE₄ | AlkLEᵥᵢᵢ | | E_{b} |
| 3310 | E_{1b}E₂EᵢᵥE₄ | AlkLEᵥᵢᵢ | | E_{b} |
| 3311 | E₁ₐE₂E₃EᵢᵥE₄ | AlkLEᵥᵢᵢ | | E_{b} |
| 3312 | E_{1b}E₂E₃EᵢᵥE₄ | AlkLEᵥᵢᵢ | | E_{b} |
| 3313 | E₁ₐE₂ | AlkLEᵥᵢᵢ | E₄* | E_{b} |
| 3314 | E_{1b}E₂ | AlkLEᵥᵢᵢ | E₄* | E_{b} |
| 3315 | E₁ₐE₂E₃ | AlkLEᵥᵢᵢ | E₄* | E_{b} |
| 3316 | E_{1b}E₂E₃ | AlkLEᵥᵢᵢ | E₄* | E_{b} |
| 3317 | E₁ₐE₂Eᵢ | AlkLEᵥᵢᵢ | E₄* | E_{b} |
| 3318 | E_{1b}E₂Eᵢ | AlkLEᵥᵢᵢ | E₄* | E_{b} |
| 3319 | E₁ₐE₂Eᵢᵢ | AlkLEᵥᵢᵢ | E₄* | E_{b} |
| 3320 | E_{1b}E₂Eᵢᵢ | AlkLEᵥᵢᵢ | E₄* | E_{b} |
| 3321 | E₁ₐE₂EᵢᵢE_{iib} | AlkLEᵥᵢᵢ | E₄* | E_{b} |
| 3322 | E_{1b}E₂EᵢᵢE_{iib} | AlkLEᵥᵢᵢ | E₄* | E_{b} |
| 3323 | E₁ₐE₂E₃Eᵢ | AlkLEᵥᵢᵢ | E₄* | E_{b} |
| 3324 | E_{1b}E₂E₃Eᵢ | AlkLEᵥᵢᵢ | E₄* | E_{b} |
| 3325 | E₁ₐE₂E₃Eᵢᵢ | AlkLEᵥᵢᵢ | E₄* | E_{b} |
| 3326 | E_{1b}E₂E₃Eᵢᵢ | AlkLEᵥᵢᵢ | E₄* | E_{b} |
| 3327 | E₁ₐE₂E₃EᵢᵢE_{iib} | AlkLEᵥᵢᵢ | E₄* | E_{b} |
| 3328 | E_{1b}E₂E₃EᵢᵢE_{iib} | AlkLEᵥᵢᵢ | E₄* | E_{b} |
| 3329 | E₁ₐE₂E₄ | AlkLEᵥᵢᵢ | E₄* | E_{b} |
| 3330 | E_{1b}E₂E₄ | AlkLEᵥᵢᵢ | E₄* | E_{b} |
| 3331 | E₁ₐE₂E₃E₄ | AlkLEᵥᵢᵢ | E₄* | E_{b} |
| 3332 | E_{1b}E₂E₃E₄ | AlkLEᵥᵢᵢ | E₄* | E_{b} |
| 3333 | E₁ₐE₂EᵢE₄ | AlkLEᵥᵢᵢ | E₄* | E_{b} |
| 3334 | E_{1b}E₂EᵢE₄ | AlkLEᵥᵢᵢ | E₄* | E_{b} |
| 3335 | E₁ₐE₂EᵢᵢE₄ | AlkLEᵥᵢᵢ | E₄* | E_{b} |
| 3336 | E_{1b}E₂EᵢᵢE₄ | AlkLEᵥᵢᵢ | E₄* | E_{b} |
| 3337 | E₁ₐE₂EᵢᵢE_{iib}E₄ | AlkLEᵥᵢᵢ | E₄* | E_{b} |
| 3338 | E_{1b}E₂EᵢᵢE_{iib}E₄ | AlkLEᵥᵢᵢ | E₄* | E_{b} |
| 3339 | E₁ₐE₂E₃EᵢE₄ | AlkLEᵥᵢᵢ | E₄* | E_{b} |
| 3340 | E_{1b}E₂E₃EᵢE₄ | AlkLEᵥᵢᵢ | E₄* | E_{b} |
| 3341 | E₁ₐE₂E₃EᵢᵢE₄ | AlkLEᵥᵢᵢ | E₄* | E_{b} |
| 3342 | E_{1b}E₂E₃EᵢᵢE₄ | AlkLEᵥᵢᵢ | E₄* | E_{b} |
| 3343 | E₁ₐE₂E₃EᵢᵢE_{iib}E₄ | AlkLEᵥᵢᵢ | E₄* | E_{b} |
| 3344 | E_{1b}E₂E₃EᵢᵢE_{iib}E₄ | AlkLEᵥᵢᵢ | E₄* | E_{b} |
| 3345 | E₁ₐE₂Eᵢᵢᵢ | AlkLEᵥᵢᵢ | E₄* | E_{b} |
| 3346 | E_{1b}E₂Eᵢᵢᵢ | AlkLEᵥᵢᵢ | E₄* | E_{b} |
| 3347 | E₁ₐE₂E₃Eᵢᵢᵢ | AlkLEᵥᵢᵢ | E₄* | E_{b} |
| 3348 | E_{1b}E₂E₃Eᵢᵢᵢ | AlkLEᵥᵢᵢ | E₄* | E_{b} |
| 3349 | E₁ₐE₂EᵢᵢᵢE₄ | AlkLEᵥᵢᵢ | E₄* | E_{b} |
| 3350 | E_{1b}E₂EᵢᵢᵢE₄ | AlkLEᵥᵢᵢ | E₄* | E_{b} |
| 3351 | E₁ₐE₂E₃EᵢᵢᵢE₄ | AlkLEᵥᵢᵢ | E₄* | E_{b} |
| 3352 | E_{1b}E₂E₃EᵢᵢᵢE₄ | AlkLEᵥᵢᵢ | E₄* | E_{b} |
| 3353 | E₁ₐE₂Eᵢᵥ | AlkLEᵥᵢᵢ | E₄* | E_{b} |
| 3354 | E_{1b}E₂Eᵢᵥ | AlkLEᵥᵢᵢ | E₄* | E_{b} |
| 3355 | E₁ₐE₂E₃Eᵢᵥ | AlkLEᵥᵢᵢ | E₄* | E_{b} |
| 3356 | E_{1b}E₂E₃Eᵢᵥ | AlkLEᵥᵢᵢ | E₄* | E_{b} |
| 3357 | E₁ₐE₂EᵢᵥE₄ | AlkLEᵥᵢᵢ | E₄* | E_{b} |
| 3358 | E_{1b}E₂EᵢᵥE₄ | AlkLEᵥᵢᵢ | E₄* | E_{b} |
| 3359 | E₁ₐE₂E₃EᵢᵥE₄ | AlkLEᵥᵢᵢ | E₄* | E_{b} |
| 3360 | E_{1b}E₂E₃EᵢᵥE₄ | AlkLEᵥᵢᵢ | E₄* | E_{b} |
| 3361 | E₁ₐE₂ | AlkLEᵥᵢᵢ | E₅ | E_{b} |
| 3362 | E_{1b}E₂ | AlkLEᵥᵢᵢ | E₅ | E_{b} |
| 3363 | E₁ₐE₂E₃ | AlkLEᵥᵢᵢ | E₅ | E_{b} |
| 3364 | E_{1b}E₂E₃ | AlkLEᵥᵢᵢ | E₅ | E_{b} |
| 3365 | E₁ₐE₂Eᵢ | AlkLEᵥᵢᵢ | E₅ | E_{b} |
| 3366 | E_{1b}E₂Eᵢ | AlkLEᵥᵢᵢ | E₅ | E_{b} |
| 3367 | E₁ₐE₂Eᵢᵢ | AlkLEᵥᵢᵢ | E₅ | E_{b} |
| 3368 | E_{1b}E₂Eᵢᵢ | AlkLEᵥᵢᵢ | E₅ | E_{b} |
| 3369 | E₁ₐE₂EᵢᵢE_{iib} | AlkLEᵥᵢᵢ | E₅ | E_{b} |
| 3370 | E_{1b}E₂EᵢᵢE_{iib} | AlkLEᵥᵢᵢ | E₅ | E_{b} |
| 3371 | E₁ₐE₂E₃Eᵢ | AlkLEᵥᵢᵢ | E₅ | E_{b} |
| 3372 | E_{1b}E₂E₃Eᵢ | AlkLEᵥᵢᵢ | E₅ | E_{b} |
| 3373 | E₁ₐE₂E₃Eᵢᵢ | AlkLEᵥᵢᵢ | E₅ | E_{b} |
| 3374 | E_{1b}E₂E₃Eᵢᵢ | AlkLEᵥᵢᵢ | E₅ | E_{b} |
| 3375 | E₁ₐE₂E₃EᵢᵢE_{iib} | AlkLEᵥᵢᵢ | E₅ | E_{b} |
| 3376 | E_{1b}E₂E₃EᵢᵢE_{iib} | AlkLEᵥᵢᵢ | E₅ | E_{b} |
| 3377 | E₁ₐE₂E₄ | AlkLEᵥᵢᵢ | E₅ | E_{b} |
| 3378 | E_{1b}E₂E₄ | AlkLEᵥᵢᵢ | E₅ | E_{b} |
| 3379 | E₁ₐE₂E₃E₄ | AlkLEᵥᵢᵢ | E₅ | E_{b} |
| 3380 | E_{1b}E₂E₃E₄ | AlkLEᵥᵢᵢ | E₅ | E_{b} |
| 3381 | E₁ₐE₂EᵢE₄ | AlkLEᵥᵢᵢ | E₅ | E_{b} |
| 3382 | E_{1b}E₂EᵢE₄ | AlkLEᵥᵢᵢ | E₅ | E_{b} |
| 3383 | E₁ₐE₂EᵢᵢE₄ | AlkLEᵥᵢᵢ | E₅ | E_{b} |
| 3384 | E_{1b}E₂EᵢᵢE₄ | AlkLEᵥᵢᵢ | E₅ | E_{b} |
| 3385 | E₁ₐE₂EᵢᵢE_{iib}E₄ | AlkLEᵥᵢᵢ | E₅ | E_{b} |
| 3386 | E_{1b}E₂EᵢᵢE_{iib}E₄ | AlkLEᵥᵢᵢ | E₅ | E_{b} |
| 3387 | E₁ₐE₂E₃EᵢE₄ | AlkLEᵥᵢᵢ | E₅ | E_{b} |
| 3388 | E_{1b}E₂E₃EᵢE₄ | AlkLEᵥᵢᵢ | E₅ | E_{b} |
| 3389 | E₁ₐE₂E₃EᵢᵢE₄ | AlkLEᵥᵢᵢ | E₅ | E_{b} |
| 3390 | E_{1b}E₂E₃EᵢᵢE₄ | AlkLEᵥᵢᵢ | E₅ | E_{b} |
| 3391 | E₁ₐE₂E₃EᵢᵢE_{iib}E₄ | AlkLEᵥᵢᵢ | E₅ | E_{b} |
| 3392 | E_{1b}E₂E₃EᵢᵢE_{iib}E₄ | AlkLEᵥᵢᵢ | E₅ | E_{b} |
| 3393 | E₁ₐE₂Eᵢᵢᵢ | AlkLEᵥᵢᵢ | E₅ | E_{b} |
| 3394 | E_{1b}E₂Eᵢᵢᵢ | AlkLEᵥᵢᵢ | E₅ | E_{b} |
| 3395 | E₁ₐE₂E₃Eᵢᵢᵢ | AlkLEᵥᵢᵢ | E₅ | E_{b} |
| 3396 | E_{1b}E₂E₃Eᵢᵢᵢ | AlkLEᵥᵢᵢ | E₅ | E_{b} |
| 3397 | E₁ₐE₂EᵢᵢᵢE₄ | AlkLEᵥᵢᵢ | E₅ | E_{b} |
| 3398 | E_{1b}E₂EᵢᵢᵢE₄ | AlkLEᵥᵢᵢ | E₅ | E_{b} |
| 3399 | E₁ₐE₂E₃EᵢᵢᵢE₄ | AlkLEᵥᵢᵢ | E₅ | E_{b} |
| 3400 | E_{1b}E₂E₃EᵢᵢᵢE₄ | AlkLEᵥᵢᵢ | E₅ | E_{b} |
| 3401 | E₁ₐE₂Eᵢᵥ | AlkLEᵥᵢᵢ | E₅ | E_{b} |
| 3402 | E_{1b}E₂Eᵢᵥ | AlkLEᵥᵢᵢ | E₅ | E_{b} |
| 3403 | E₁ₐE₂E₃Eᵢᵥ | AlkLEᵥᵢᵢ | E₅ | E_{b} |
| 3404 | E_{1b}E₂E₃Eᵢᵥ | AlkLEᵥᵢᵢ | E₅ | E_{b} |
| 3405 | E₁ₐE₂EᵢᵥE₄ | AlkLEᵥᵢᵢ | E₅ | E_{b} |
| 3406 | E_{1b}E₂EᵢᵥE₄ | AlkLEᵥᵢᵢ | E₅ | E_{b} |
| 3407 | E₁ₐE₂E₃EᵢᵥE₄ | AlkLEᵥᵢᵢ | E₅ | E_{b} |
| 3408 | E_{1b}E₂E₃EᵢᵥE₄ | AlkLEᵥᵢᵢ | E₅ | E_{b} |
| 3409 | E₁ₐE₂ | AlkLEᵥᵢᵢ | E₄*E₅ | E_{b} |
| 3410 | E_{1b}E₂ | AlkLEᵥᵢᵢ | E₄*E₅ | E_{b} |
| 3411 | E₁ₐE₂E₃ | AlkLEᵥᵢᵢ | E₄*E₅ | E_{b} |
| 3412 | E_{1b}E₂E₃ | AlkLEᵥᵢᵢ | E₄*E₅ | E_{b} |
| 3413 | E₁ₐE₂Eᵢ | AlkLEᵥᵢᵢ | E₄*E₅ | E_{b} |
| 3414 | E_{1b}E₂Eᵢ | AlkLEᵥᵢᵢ | E₄*E₅ | E_{b} |
| 3415 | E₁ₐE₂Eᵢᵢ | AlkLEᵥᵢᵢ | E₄*E₅ | E_{b} |
| 3416 | E_{1b}E₂Eᵢᵢ | AlkLEᵥᵢᵢ | E₄*E₅ | E_{b} |
| 3417 | E₁ₐE₂EᵢᵢE_{iib} | AlkLEᵥᵢᵢ | E₄*E₅ | E_{b} |
| 3418 | E_{1b}E₂EᵢᵢE_{iib} | AlkLEᵥᵢᵢ | E₄*E₅ | E_{b} |
| 3419 | E₁ₐE₂E₃Eᵢ | AlkLEᵥᵢᵢ | E₄*E₅ | E_{b} |
| 3420 | E_{1b}E₂E₃Eᵢ | AlkLEᵥᵢᵢ | E₄*E₅ | E_{b} |
| 3421 | E₁ₐE₂E₃Eᵢᵢ | AlkLEᵥᵢᵢ | E₄*E₅ | E_{b} |
| 3422 | E_{1b}E₂E₃Eᵢᵢ | AlkLEᵥᵢᵢ | E₄*E₅ | E_{b} |
| 3423 | E₁ₐE₂E₃EᵢᵢE_{iib} | AlkLEᵥᵢᵢ | E₄*E₅ | E_{b} |
| 3424 | E_{1b}E₂E₃EᵢᵢE_{iib} | AlkLEᵥᵢᵢ | E₄*E₅ | E_{b} |
| 3425 | E₁ₐE₂E₄ | AlkLEᵥᵢᵢ | E₄*E₅ | E_{b} |
| 3426 | E_{1b}E₂E₄ | AlkLEᵥᵢᵢ | E₄*E₅ | E_{b} |
| 3427 | E₁ₐE₂E₃E₄ | AlkLEᵥᵢᵢ | E₄*E₅ | E_{b} |
| 3428 | E_{1b}E₂E₃E₄ | AlkLEᵥᵢᵢ | E₄*E₅ | E_{b} |
| 3429 | E₁ₐE₂EᵢE₄ | AlkLEᵥᵢᵢ | E₄*E₅ | E_{b} |
| 3430 | E_{1b}E₂EᵢE₄ | AlkLEᵥᵢᵢ | E₄*E₅ | E_{b} |
| 3431 | E₁ₐE₂EᵢᵢE₄ | AlkLEᵥᵢᵢ | E₄*E₅ | E_{b} |
| 3432 | E_{1b}E₂EᵢᵢE₄ | AlkLEᵥᵢᵢ | E₄*E₅ | E_{b} |
| 3433 | E₁ₐE₂EᵢᵢE_{iib}E₄ | AlkLEᵥᵢᵢ | E₄*E₅ | E_{b} |
| 3434 | E_{1b}E₂EᵢᵢE_{iib}E₄ | AlkLEᵥᵢᵢ | E₄*E₅ | E_{b} |
| 3435 | E₁ₐE₂E₃EᵢE₄ | AlkLEᵥᵢᵢ | E₄*E₅ | E_{b} |
| 3436 | E_{1b}E₂E₃EᵢE₄ | AlkLEᵥᵢᵢ | E₄*E₅ | E_{b} |
| 3437 | E₁ₐE₂E₃EᵢᵢE₄ | AlkLEᵥᵢᵢ | E₄*E₅ | E_{b} |
| 3438 | E_{1b}E₂E₃EᵢᵢE₄ | AlkLEᵥᵢᵢ | E₄*E₅ | E_{b} |
| 3439 | E₁ₐE₂E₃EᵢᵢE_{iib}E₄ | AlkLEᵥᵢᵢ | E₄*E₅ | E_{b} |
| 3440 | E_{1b}E₂E₃EᵢᵢE_{iib}E₄ | AlkLEᵥᵢᵢ | E₄*E₅ | E_{b} |
| 3441 | E₁ₐE₂Eᵢᵢᵢ | AlkLEᵥᵢᵢ | E₄*E₅ | E_{b} |
| 3442 | E_{1b}E₂Eᵢᵢᵢ | AlkLEᵥᵢᵢ | E₄*E₅ | E_{b} |
| 3443 | E₁ₐE₂E₃Eᵢᵢᵢ | AlkLEᵥᵢᵢ | E₄*E₅ | E_{b} |
| 3444 | E_{1b}E₂E₃Eᵢᵢᵢ | AlkLEᵥᵢᵢ | E₄*E₅ | E_{b} |
| 3445 | E₁ₐE₂EᵢᵢᵢE₄ | AlkLEᵥᵢᵢ | E₄*E₅ | E_{b} |
| 3446 | E_{1b}E₂EᵢᵢᵢE₄ | AlkLEᵥᵢᵢ | E₄*E₅ | E_{b} |
| 3447 | E₁ₐE₂E₃EᵢᵢᵢE₄ | AlkLEᵥᵢᵢ | E₄*E₅ | E_{b} |
| 3448 | E_{1b}E₂E₃EᵢᵢᵢE₄ | AlkLEᵥᵢᵢ | E₄*E₅ | E_{b} |
| 3449 | E₁ₐE₂Eᵢᵥ | AlkLEᵥᵢᵢ | E₄*E₅ | E_{b} |
| 3450 | E_{1b}E₂Eᵢᵥ | AlkLEᵥᵢᵢ | E₄*E₅ | E_{b} |
| 3451 | E₁ₐE₂E₃Eᵢᵥ | AlkLEᵥᵢᵢ | E₄*E₅ | E_{b} |
| 3452 | E_{1b}E₂E₃Eᵢᵥ | AlkLEᵥᵢᵢ | E₄*E₅ | E_{b} |
| 3453 | E₁ₐE₂EᵢᵥE₄ | AlkLEᵥᵢᵢ | E₄*E₅ | E_{b} |
| 3454 | E_{1b}E₂EᵢᵥE₄ | AlkLEᵥᵢᵢ | E₄*E₅ | E_{b} |
| 3455 | E₁ₐE₂E₃EᵢᵥE₄ | AlkLEᵥᵢᵢ | E₄*E₅ | E_{b} |
| 3456 | E_{1b}E₂E₃EᵢᵥE₄ | AlkLEᵥᵢᵢ | E₄*E₅ | E_{b} |
| 3457 | E₁ₐE₂ | Eᵥᵢᵢ | | E_{d} |
| 3458 | E_{1b}E₂ | Eᵥᵢᵢ | | E_{d} |
| 3459 | E₁ₐE₂E₃ | Eᵥᵢᵢ | | E_{d} |
| 3460 | E_{1b}E₂E₃ | Eᵥᵢᵢ | | E_{d} |
| 3461 | E₁ₐE₂Eᵢ | Eᵥᵢᵢ | | E_{d} |
| 3462 | E_{1b}E₂Eᵢ | Eᵥᵢᵢ | | E_{d} |
| 3463 | E₁ₐE₂Eᵢᵢ | Eᵥᵢᵢ | | E_{d} |
| 3464 | E_{1b}E₂Eᵢᵢ | Eᵥᵢᵢ | | E_{d} |
| 3465 | E₁ₐE₂EᵢᵢE_{iib} | Eᵥᵢᵢ | | E_{d} |
| 3466 | E_{1b}E₂EᵢᵢE_{iib} | Eᵥᵢᵢ | | E_{d} |
| 3467 | E₁ₐE₂E₃Eᵢ | Eᵥᵢᵢ | | E_{d} |
| 3468 | E_{1b}E₂E₃Eᵢ | Eᵥᵢᵢ | | E_{d} |
| 3469 | E₁ₐE₂E₃Eᵢᵢ | Eᵥᵢᵢ | | E_{d} |
| 3470 | E_{1b}E₂E₃Eᵢᵢ | Eᵥᵢᵢ | | E_{d} |
| 3471 | E₁ₐE₂E₃EᵢᵢE_{iib} | Eᵥᵢᵢ | | E_{d} |
| 3472 | E_{1b}E₂E₃EᵢᵢE_{iib} | Eᵥᵢᵢ | | E_{d} |
| 3473 | E₁ₐE₂E₄ | Eᵥᵢᵢ | | E_{d} |
| 3474 | E_{1b}E₂E₄ | Eᵥᵢᵢ | | E_{d} |
| 3475 | E₁ₐE₂E₃E₄ | Eᵥᵢᵢ | | E_{d} |
| 3476 | E_{1b}E₂E₃E₄ | Eᵥᵢᵢ | | E_{d} |
| 3477 | E₁ₐE₂EᵢE₄ | Eᵥᵢᵢ | | E_{d} |
| 3478 | E_{1b}E₂EᵢE₄ | Eᵥᵢᵢ | | E_{d} |
| 3479 | E₁ₐE₂EᵢᵢE₄ | Eᵥᵢᵢ | | E_{d} |
| 3480 | E_{1b}E₂EᵢᵢE₄ | Eᵥᵢᵢ | | E_{d} |
| 3481 | E₁ₐE₂EᵢᵢE_{iib}E₄ | Eᵥᵢᵢ | | E_{d} |
| 3482 | E_{1b}E₂EᵢᵢE_{iib}E₄ | Eᵥᵢᵢ | | E_{d} |
| 3483 | E₁ₐE₂E₃EᵢE₄ | Eᵥᵢᵢ | | E_{d} |
| 3484 | E_{1b}E₂E₃EᵢE₄ | Eᵥᵢᵢ | | E_{d} |
| 3485 | E₁ₐE₂E₃EᵢᵢE₄ | Eᵥᵢᵢ | | E_{d} |
| 3486 | E_{1b}E₂E₃EᵢᵢE₄ | Eᵥᵢᵢ | | E_{d} |
| 3487 | E₁ₐE₂E₃EᵢᵢE_{iib}E₄ | Eᵥᵢᵢ | | E_{d} |
| 3488 | E_{1b}E₂E₃EᵢᵢE_{iib}E₄ | Eᵥᵢᵢ | | E_{d} |
| 3489 | E₁ₐE₂Eᵢᵢᵢ | Eᵥᵢᵢ | | E_{d} |
| 3490 | E_{1b}E₂Eᵢᵢᵢ | Eᵥᵢᵢ | | E_{d} |
| 3491 | E₁ₐE₂E₃Eᵢᵢᵢ | Eᵥᵢᵢ | | E_{d} |
| 3492 | E_{1b}E₂E₃Eᵢᵢᵢ | Eᵥᵢᵢ | | E_{d} |
| 3493 | E₁ₐE₂EᵢᵢᵢE₄ | Eᵥᵢᵢ | | E_{d} |
| 3494 | E_{1b}E₂EᵢᵢᵢE₄ | Eᵥᵢᵢ | | E_{d} |
| 3495 | E₁ₐE₂E₃EᵢᵢᵢE₄ | Eᵥᵢᵢ | | E_{d} |
| 3496 | E_{1b}E₂E₃EᵢᵢᵢE₄ | Eᵥᵢᵢ | | E_{d} |
| 3497 | E₁ₐE₂Eᵢᵥ | Eᵥᵢᵢ | | E_{d} |
| 3498 | E_{1b}E₂Eᵢᵥ | Eᵥᵢᵢ | | E_{d} |
| 3499 | E₁ₐE₂E₃Eᵢᵥ | Eᵥᵢᵢ | | E_{d} |
| 3500 | E_{1b}E₂E₃Eᵢᵥ | Eᵥᵢᵢ | | E_{d} |
| 3501 | E₁ₐE₂EᵢᵥE₄ | Eᵥᵢᵢ | | E_{d} |
| 3502 | E_{1b}E₂EᵢᵥE₄ | Eᵥᵢᵢ | | E_{d} |
| 3503 | E₁ₐE₂E₃EᵢᵥE₄ | Eᵥᵢᵢ | | E_{d} |
| 3504 | E_{1b}E₂E₃EᵢᵥE₄ | Eᵥᵢᵢ | | E_{d} |
| 3505 | E₁ₐE₂ | Eᵥᵢᵢ | E₄* | E_{d} |
| 3506 | E_{1b}E₂ | Eᵥᵢᵢ | E₄* | E_{d} |
| 3507 | E₁ₐE₂E₃ | Eᵥᵢᵢ | E₄* | E_{d} |
| 3508 | E_{1b}E₂E₃ | Eᵥᵢᵢ | E₄* | E_{d} |
| 3509 | E₁ₐE₂Eᵢ | Eᵥᵢᵢ | E₄* | E_{d} |
| 3510 | E_{1b}E₂Eᵢ | Eᵥᵢᵢ | E₄* | E_{d} |
| 3511 | E₁ₐE₂Eᵢᵢ | Eᵥᵢᵢ | E₄* | E_{d} |
| 3512 | E_{1b}E₂Eᵢᵢ | Eᵥᵢᵢ | E₄* | E_{d} |
| 3513 | E₁ₐE₂EᵢᵢE_{iib} | Eᵥᵢᵢ | E₄* | E_{d} |
| 3514 | E_{1b}E₂EᵢᵢE_{iib} | Eᵥᵢᵢ | E₄* | E_{d} |
| 3515 | E₁ₐE₂E₃Eᵢ | Eᵥᵢᵢ | E₄* | E_{d} |
| 3516 | E_{1b}E₂E₃Eᵢ | Eᵥᵢᵢ | E₄* | E_{d} |
| 3517 | E₁ₐE₂E₃Eᵢᵢ | Eᵥᵢᵢ | E₄* | E_{d} |
| 3518 | E_{1b}E₂E₃Eᵢᵢ | Eᵥᵢᵢ | E₄* | E_{d} |
| 3519 | E₁ₐE₂E₃EᵢᵢE_{iib} | Eᵥᵢᵢ | E₄* | E_{d} |
| 3520 | E_{1b}E₂E₃EᵢᵢE_{iib} | Eᵥᵢᵢ | E₄* | E_{d} |
| 3521 | E₁ₐE₂E₄ | Eᵥᵢᵢ | E₄* | E_{d} |
| 3522 | E_{1b}E₂E₄ | Eᵥᵢᵢ | E₄* | E_{d} |
| 3523 | E₁ₐE₂E₃E₄ | Eᵥᵢᵢ | E₄* | E_{d} |
| 3524 | E_{1b}E₂E₃E₄ | Eᵥᵢᵢ | E₄* | E_{d} |
| 3525 | E₁ₐE₂EᵢE₄ | Eᵥᵢᵢ | E₄* | E_{d} |
| 3526 | E_{1b}E₂EᵢE₄ | Eᵥᵢᵢ | E₄* | E_{d} |
| 3527 | E₁ₐE₂EᵢᵢE₄ | Eᵥᵢᵢ | E₄* | E_{d} |
| 3528 | E_{1b}E₂EᵢᵢE₄ | Eᵥᵢᵢ | E₄* | E_{d} |
| 3529 | E₁ₐE₂EᵢᵢE_{iib}E₄ | Eᵥᵢᵢ | E₄* | E_{d} |
| 3530 | E_{1b}E₂EᵢᵢE_{iib}E₄ | Eᵥᵢᵢ | E₄* | E_{d} |
| 3531 | E₁ₐE₂E₃EᵢE₄ | Eᵥᵢᵢ | E₄* | E_{d} |
| 3532 | E_{1b}E₂E₃EᵢE₄ | Eᵥᵢᵢ | E₄* | E_{d} |
| 3533 | E₁ₐE₂E₃EᵢᵢE₄ | Eᵥᵢᵢ | E₄* | E_{d} |
| 3534 | E_{1b}E₂E₃EᵢᵢE₄ | Eᵥᵢᵢ | E₄* | E_{d} |
| 3535 | E₁ₐE₂E₃EᵢᵢE_{iib}E₄ | Eᵥᵢᵢ | E₄* | E_{d} |
| 3536 | E_{1b}E₂E₃EᵢᵢE_{iib}E₄ | Eᵥᵢᵢ | E₄* | E_{d} |
| 3537 | E₁ₐE₂Eᵢᵢᵢ | Eᵥᵢᵢ | E₄* | E_{d} |
| 3538 | E_{1b}E₂Eᵢᵢᵢ | Eᵥᵢᵢ | E₄* | E_{d} |
| 3539 | E₁ₐE₂E₃Eᵢᵢᵢ | Eᵥᵢᵢ | E₄* | E_{d} |
| 3540 | E_{1b}E₂E₃Eᵢᵢᵢ | Eᵥᵢᵢ | E₄* | E_{d} |
| 3541 | E₁ₐE₂EᵢᵢᵢE₄ | Eᵥᵢᵢ | E₄* | E_{d} |
| 3542 | E_{1b}E₂EᵢᵢᵢE₄ | Eᵥᵢᵢ | E₄* | E_{d} |
| 3543 | E₁ₐE₂E₃EᵢᵢᵢE₄ | Eᵥᵢᵢ | E₄* | E_{d} |
| 3544 | E_{1b}E₂E₃EᵢᵢᵢE₄ | Eᵥᵢᵢ | E₄* | E_{d} |
| 3545 | E₁ₐE₂Eᵢᵥ | Eᵥᵢᵢ | E₄* | E_{d} |
| 3546 | E_{1b}E₂Eᵢᵥ | Eᵥᵢᵢ | E₄* | E_{d} |
| 3547 | E₁ₐE₂E₃Eᵢᵥ | Eᵥᵢᵢ | E₄* | E_{d} |
| 3548 | E_{1b}E₂E₃Eᵢᵥ | Eᵥᵢᵢ | E₄* | E_{d} |
| 3549 | E₁ₐE₂EᵢᵥE₄ | Eᵥᵢᵢ | E₄* | E_{d} |
| 3550 | E_{1b}E₂EᵢᵥE₄ | Eᵥᵢᵢ | E₄* | E_{d} |
| 3551 | E₁ₐE₂E₃EᵢᵥE₄ | Eᵥᵢᵢ | E₄* | E_{d} |
| 3552 | E_{1b}E₂E₃EᵢᵥE₄ | Eᵥᵢᵢ | E₄* | E_{d} |
| 3553 | E₁ₐE₂ | Eᵥᵢᵢ | E₅ | E_{d} |
| 3554 | E_{1b}E₂ | Eᵥᵢᵢ | E₅ | E_{d} |
| 3555 | E₁ₐE₂E₃ | Eᵥᵢᵢ | E₅ | E_{d} |
| 3556 | E_{1b}E₂E₃ | Eᵥᵢᵢ | E₅ | E_{d} |
| 3557 | E₁ₐE₂Eᵢ | Eᵥᵢᵢ | E₅ | E_{d} |
| 3558 | E_{1b}E₂Eᵢ | Eᵥᵢᵢ | E₅ | E_{d} |
| 3559 | E₁ₐE₂Eᵢᵢ | Eᵥᵢᵢ | E₅ | E_{d} |
| 3560 | E_{1b}E₂Eᵢᵢ | Eᵥᵢᵢ | E₅ | E_{d} |
| 3561 | E₁ₐE₂EᵢᵢE_{iib} | Eᵥᵢᵢ | E₅ | E_{d} |
| 3562 | E_{1b}E₂EᵢᵢE_{iib} | Eᵥᵢᵢ | E₅ | E_{d} |
| 3563 | E₁ₐE₂E₃Eᵢ | Eᵥᵢᵢ | E₅ | E_{d} |
| 3564 | E_{1b}E₂E₃Eᵢ | Eᵥᵢᵢ | E₅ | E_{d} |
| 3565 | E₁ₐE₂E₃Eᵢᵢ | Eᵥᵢᵢ | E₅ | E_{d} |
| 3566 | E_{1b}E₂E₃Eᵢᵢ | Eᵥᵢᵢ | E₅ | E_{d} |
| 3567 | E₁ₐE₂E₃EᵢᵢE_{iib} | Eᵥᵢᵢ | E₅ | E_{d} |
| 3568 | E_{1b}E₂E₃EᵢᵢE_{iib} | Eᵥᵢᵢ | E₅ | E_{d} |
| 3569 | E₁ₐE₂E₄ | Eᵥᵢᵢ | E₅ | E_{d} |
| 3570 | E_{1b}E₂E₄ | Eᵥᵢᵢ | E₅ | E_{d} |
| 3571 | E₁ₐE₂E₃E₄ | Eᵥᵢᵢ | E₅ | E_{d} |
| 3572 | E_{1b}E₂E₃E₄ | Eᵥᵢᵢ | E₅ | E_{d} |
| 3573 | E₁ₐE₂EᵢE₄ | Eᵥᵢᵢ | E₅ | E_{d} |
| 3574 | E_{1b}E₂EᵢE₄ | Eᵥᵢᵢ | E₅ | E_{d} |
| 3575 | E₁ₐE₂EᵢᵢE₄ | Eᵥᵢᵢ | E₅ | E_{d} |
| 3576 | E_{1b}E₂EᵢᵢE₄ | Eᵥᵢᵢ | E₅ | E_{d} |
| 3577 | E₁ₐE₂EᵢᵢE_{iib}E₄ | Eᵥᵢᵢ | E₅ | E_{d} |
| 3578 | E_{1b}E₂EᵢᵢE_{iib}E₄ | Eᵥᵢᵢ | E₅ | E_{d} |
| 3579 | E₁ₐE₂E₃EᵢE₄ | Eᵥᵢᵢ | E₅ | E_{d} |
| 3580 | E_{1b}E₂E₃EᵢE₄ | Eᵥᵢᵢ | E₅ | E_{d} |
| 3581 | E₁ₐE₂E₃EᵢᵢE₄ | Eᵥᵢᵢ | E₅ | E_{d} |
| 3582 | E_{1b}E₂E₃EᵢᵢE₄ | Eᵥᵢᵢ | E₅ | E_{d} |
| 3583 | E₁ₐE₂E₃EᵢᵢE_{iib}E₄ | Eᵥᵢᵢ | E₅ | E_{d} |
| 3584 | E_{1b}E₂E₃EᵢᵢE_{iib}E₄ | Eᵥᵢᵢ | E₅ | E_{d} |
| 3585 | E₁ₐE₂Eᵢᵢᵢ | Eᵥᵢᵢ | E₅ | E_{d} |
| 3586 | E_{1b}E₂Eᵢᵢᵢ | Eᵥᵢᵢ | E₅ | E_{d} |
| 3587 | E₁ₐE₂E₃Eᵢᵢᵢ | Eᵥᵢᵢ | E₅ | E_{d} |
| 3588 | E_{1b}E₂E₃Eᵢᵢᵢ | Eᵥᵢᵢ | E₅ | E_{d} |
| 3589 | E₁ₐE₂EᵢᵢᵢE₄ | Eᵥᵢᵢ | E₅ | E_{d} |
| 3590 | E_{1b}E₂EᵢᵢᵢE₄ | Eᵥᵢᵢ | E₅ | E_{d} |
| 3591 | E₁ₐE₂E₃EᵢᵢᵢE₄ | Eᵥᵢᵢ | E₅ | E_{d} |
| 3592 | E_{1b}E₂E₃EᵢᵢᵢE₄ | Eᵥᵢᵢ | E₅ | E_{d} |
| 3593 | E₁ₐE₂Eᵢᵥ | Eᵥᵢᵢ | E₅ | E_{d} |
| 3594 | E_{1b}E₂Eᵢᵥ | Eᵥᵢᵢ | E₅ | E_{d} |
| 3595 | E₁ₐE₂E₃Eᵢᵥ | Eᵥᵢᵢ | E₅ | E_{d} |
| 3596 | E_{1b}E₂E₃Eᵢᵥ | Eᵥᵢᵢ | E₅ | E_{d} |
| 3597 | E₁ₐE₂EᵢᵥE₄ | Eᵥᵢᵢ | E₅ | E_{d} |
| 3598 | E_{1b}E₂EᵢᵥE₄ | Eᵥᵢᵢ | E₅ | E_{d} |
| 3599 | E₁ₐE₂E₃EᵢᵥE₄ | Eᵥᵢᵢ | E₅ | E_{d} |
| 3600 | E_{1b}E₂E₃EᵢᵥE₄ | Eᵥᵢᵢ | E₅ | E_{d} |
| 3601 | E₁ₐE₂ | Eᵥᵢᵢ | E₄*E₅ | E_{d} |
| 3602 | E_{1b}E₂ | Eᵥᵢᵢ | E₄*E₅ | E_{d} |
| 3603 | E₁ₐE₂E₃ | Eᵥᵢᵢ | E₄*E₅ | E_{d} |
| 3604 | E_{1b}E₂E₃ | Eᵥᵢᵢ | E₄*E₅ | E_{d} |
| 3605 | E₁ₐE₂Eᵢ | Eᵥᵢᵢ | E₄*E₅ | E_{d} |
| 3606 | E_{1b}E₂Eᵢ | Eᵥᵢᵢ | E₄*E₅ | E_{d} |
| 3607 | E₁ₐE₂Eᵢᵢ | Eᵥᵢᵢ | E₄*E₅ | E_{d} |
| 3608 | E_{1b}E₂Eᵢᵢ | Eᵥᵢᵢ | E₄*E₅ | E_{d} |
| 3609 | E₁ₐE₂EᵢᵢE_{iib} | Eᵥᵢᵢ | E₄*E₅ | E_{d} |
| 3610 | E_{1b}E₂EᵢᵢE_{iib} | Eᵥᵢᵢ | E₄*E₅ | E_{d} |
| 3611 | E₁ₐE₂E₃Eᵢ | Eᵥᵢᵢ | E₄*E₅ | E_{d} |
| 3612 | E_{1b}E₂E₃Eᵢ | Eᵥᵢᵢ | E₄*E₅ | E_{d} |
| 3613 | E₁ₐE₂E₃Eᵢᵢ | Eᵥᵢᵢ | E₄*E₅ | E_{d} |
| 3614 | E_{1b}E₂E₃Eᵢᵢ | Eᵥᵢᵢ | E₄*E₅ | E_{d} |
| 3615 | E₁ₐE₂E₃EᵢᵢE_{iib} | Eᵥᵢᵢ | E₄*E₅ | E_{d} |
| 3616 | E_{1b}E₂E₃EᵢᵢE_{iib} | Eᵥᵢᵢ | E₄*E₅ | E_{d} |
| 3617 | E₁ₐE₂E₄ | Eᵥᵢᵢ | E₄*E₅ | E_{d} |
| 3618 | E_{1b}E₂E₄ | Eᵥᵢᵢ | E₄*E₅ | E_{d} |
| 3619 | E₁ₐE₂E₃E₄ | Eᵥᵢᵢ | E₄*E₅ | E_{d} |
| 3620 | E_{1b}E₂E₃E₄ | Eᵥᵢᵢ | E₄*E₅ | E_{d} |
| 3621 | E₁ₐE₂EᵢE₄ | Eᵥᵢᵢ | E₄*E₅ | E_{d} |
| 3622 | E_{1b}E₂EᵢE₄ | Eᵥᵢᵢ | E₄*E₅ | E_{d} |
| 3623 | E₁ₐE₂EᵢᵢE₄ | Eᵥᵢᵢ | E₄*E₅ | E_{d} |
| 3624 | E_{1b}E₂EᵢᵢE₄ | Eᵥᵢᵢ | E₄*E₅ | E_{d} |
| 3625 | E₁ₐE₂EᵢᵢE_{iib}E₄ | Eᵥᵢᵢ | E₄*E₅ | E_{d} |
| 3626 | E_{1b}E₂EᵢᵢE_{iib}E₄ | Eᵥᵢᵢ | E₄*E₅ | E_{d} |
| 3627 | E₁ₐE₂E₃EᵢE₄ | Eᵥᵢᵢ | E₄*E₅ | E_{d} |
| 3628 | E_{1b}E₂E₃EᵢE₄ | Eᵥᵢᵢ | E₄*E₅ | E_{d} |
| 3629 | E₁ₐE₂E₃EᵢᵢE₄ | Eᵥᵢᵢ | E₄*E₅ | E_{d} |
| 3630 | E_{1b}E₂E₃EᵢᵢE₄ | Eᵥᵢᵢ | E₄*E₅ | E_{d} |
| 3631 | E₁ₐE₂E₃EᵢᵢE_{iib}E₄ | Eᵥᵢᵢ | E₄*E₅ | E_{d} |
| 3632 | E_{1b}E₂E₃EᵢᵢE_{iib}E₄ | Eᵥᵢᵢ | E₄*E₅ | E_{d} |
| 3633 | E₁ₐE₂Eᵢᵢᵢ | Eᵥᵢᵢ | E₄*E₅ | E_{d} |
| 3634 | E_{1b}E₂Eᵢᵢᵢ | Eᵥᵢᵢ | E₄*E₅ | E_{d} |
| 3635 | E₁ₐE₂E₃Eᵢᵢᵢ | Eᵥᵢᵢ | E₄*E₅ | E_{d} |
| 3636 | E_{1b}E₂E₃Eᵢᵢᵢ | Eᵥᵢᵢ | E₄*E₅ | E_{d} |
| 3637 | E₁ₐE₂EᵢᵢᵢE₄ | Eᵥᵢᵢ | E₄*E₅ | E_{d} |
| 3638 | E_{1b}E₂EᵢᵢᵢE₄ | Eᵥᵢᵢ | E₄*E₅ | E_{d} |
| 3639 | E₁ₐE₂E₃EᵢᵢᵢE₄ | Eᵥᵢᵢ | E₄*E₅ | E_{d} |
| 3640 | E_{1b}E₂E₃EᵢᵢᵢE₄ | Eᵥᵢᵢ | E₄*E₅ | E_{d} |
| 3641 | E₁ₐE₂Eᵢᵥ | Eᵥᵢᵢ | E₄*E₅ | E_{d} |
| 3642 | E_{1b}E₂Eᵢᵥ | Eᵥᵢᵢ | E₄*E₅ | E_{d} |
| 3643 | E₁ₐE₂E₃Eᵢᵥ | Eᵥᵢᵢ | E₄*E₅ | E_{d} |
| 3644 | E_{1b}E₂E₃Eᵢᵥ | Eᵥᵢᵢ | E₄*E₅ | E_{d} |
| 3645 | E₁ₐE₂EᵢᵥE₄ | Eᵥᵢᵢ | E₄*E₅ | E_{d} |
| 3646 | E_{1b}E₂EᵢᵥE₄ | Eᵥᵢᵢ | E₄*E₅ | E_{d} |
| 3647 | E₁ₐE₂E₃EᵢᵥE₄ | Eᵥᵢᵢ | E₄*E₅ | E_{d} |
| 3648 | E_{1b}E₂E₃EᵢᵥE₄ | Eᵥᵢᵢ | E₄*E₅ | E_{d} |
| 3649 | E₁ₐE₂ | AlkLEᵥᵢᵢ | | E_{d} |
| 3650 | E_{1b}E₂ | AlkLEᵥᵢᵢ | | E_{d} |
| 3651 | E₁ₐE₂E₃ | AlkLEᵥᵢᵢ | | E_{d} |
| 3652 | E_{1b}E₂E₃ | AlkLEᵥᵢᵢ | | E_{d} |
| 3653 | E₁ₐE₂Eᵢ | AlkLEᵥᵢᵢ | | E_{d} |
| 3654 | E_{1b}E₂Eᵢ | AlkLEᵥᵢᵢ | | E_{d} |
| 3655 | E₁ₐE₂Eᵢᵢ | AlkLEᵥᵢᵢ | | E_{d} |
| 3656 | E_{1b}E₂Eᵢᵢ | AlkLEᵥᵢᵢ | | E_{d} |
| 3657 | E₁ₐE₂EᵢᵢE_{iib} | AlkLEᵥᵢᵢ | | E_{d} |
| 3658 | E_{1b}E₂EᵢᵢE_{iib} | AlkLEᵥᵢᵢ | | E_{d} |
| 3659 | E₁ₐE₂E₃Eᵢ | AlkLEᵥᵢᵢ | | E_{d} |
| 3660 | E_{1b}E₂E₃Eᵢ | AlkLEᵥᵢᵢ | | E_{d} |
| 3661 | E₁ₐE₂E₃Eᵢᵢ | AlkLEᵥᵢᵢ | | E_{d} |
| 3662 | E_{1b}E₂E₃Eᵢᵢ | AlkLEᵥᵢᵢ | | E_{d} |
| 3663 | E₁ₐE₂E₃EᵢᵢE_{iib} | AlkLEᵥᵢᵢ | | E_{d} |
| 3664 | E_{1b}E₂E₃EᵢᵢE_{iib} | AlkLEᵥᵢᵢ | | E_{d} |
| 3665 | E₁ₐE₂E₄ | AlkLEᵥᵢᵢ | | E_{d} |
| 3666 | E_{1b}E₂E₄ | AlkLEᵥᵢᵢ | | E_{d} |
| 3667 | E₁ₐE₂E₃E₄ | AlkLEᵥᵢᵢ | | E_{d} |
| 3668 | E_{1b}E₂E₃E₄ | AlkLEᵥᵢᵢ | | E_{d} |
| 3669 | E₁ₐE₂EᵢE₄ | AlkLEᵥᵢᵢ | | E_{d} |
| 3670 | E_{1b}E₂EᵢE₄ | AlkLEᵥᵢᵢ | | E_{d} |
| 3671 | E₁ₐE₂EᵢᵢE₄ | AlkLEᵥᵢᵢ | | E_{d} |
| 3672 | E_{1b}E₂EᵢᵢE₄ | AlkLEᵥᵢᵢ | | E_{d} |
| 3673 | E₁ₐE₂EᵢᵢE_{iib}E₄ | AlkLEᵥᵢᵢ | | E_{d} |
| 3674 | E_{1b}E₂EᵢᵢE_{iib}E₄ | AlkLEᵥᵢᵢ | | E_{d} |
| 3675 | E₁ₐE₂E₃EᵢE₄ | AlkLEᵥᵢᵢ | | E_{d} |
| 3676 | E_{1b}E₂E₃EᵢE₄ | AlkLEᵥᵢᵢ | | E_{d} |
| 3677 | E₁ₐE₂E₃EᵢᵢE₄ | AlkLEᵥᵢᵢ | | E_{d} |
| 3678 | E_{1b}E₂E₃EᵢᵢE₄ | AlkLEᵥᵢᵢ | | E_{d} |
| 3679 | E₁ₐE₂E₃EᵢᵢE_{iib}E₄ | AlkLEᵥᵢᵢ | | E_{d} |
| 3680 | E_{1b}E₂E₃EᵢᵢE_{iib}E₄ | AlkLEᵥᵢᵢ | | E_{d} |
| 3681 | E₁ₐE₂Eᵢᵢᵢ | AlkLEᵥᵢᵢ | | E_{d} |
| 3682 | E_{1b}E₂Eᵢᵢᵢ | AlkLEᵥᵢᵢ | | E_{d} |
| 3683 | E₁ₐE₂E₃Eᵢᵢᵢ | AlkLEᵥᵢᵢ | | E_{d} |
| 3684 | E_{1b}E₂E₃Eᵢᵢᵢ | AlkLEᵥᵢᵢ | | E_{d} |
| 3685 | E₁ₐE₂EᵢᵢᵢE₄ | AlkLEᵥᵢᵢ | | E_{d} |
| 3686 | E_{1b}E₂EᵢᵢᵢE₄ | AlkLEᵥᵢᵢ | | E_{d} |
| 3687 | E₁ₐE₂E₃EᵢᵢᵢE₄ | AlkLEᵥᵢᵢ | | E_{d} |
| 3688 | E_{1b}E₂E₃EᵢᵢᵢE₄ | AlkLEᵥᵢᵢ | | E_{d} |
| 3689 | E₁ₐE₂Eᵢᵥ | AlkLEᵥᵢᵢ | | E_{d} |
| 3690 | E_{1b}E₂Eᵢᵥ | AlkLEᵥᵢᵢ | | E_{d} |
| 3691 | E₁ₐE₂E₃Eᵢᵥ | AlkLEᵥᵢᵢ | | E_{d} |
| 3692 | E_{1b}E₂E₃Eᵢᵥ | AlkLEᵥᵢᵢ | | E_{d} |
| 3693 | E₁ₐE₂EᵢᵥE₄ | AlkLEᵥᵢᵢ | | E_{d} |
| 3694 | E_{1b}E₂EᵢᵥE₄ | AlkLEᵥᵢᵢ | | E_{d} |
| 3695 | E₁ₐE₂E₃EᵢᵥE₄ | AlkLEᵥᵢᵢ | | E_{d} |
| 3696 | E_{1b}E₂E₃EᵢᵥE₄ | AlkLEᵥᵢᵢ | | E_{d} |
| 3697 | E₁ₐE₂ | AlkLEᵥᵢᵢ | E₄* | E_{d} |
| 3698 | E_{1b}E₂ | AlkLEᵥᵢᵢ | E₄* | E_{d} |
| 3699 | E₁ₐE₂E₃ | AlkLEᵥᵢᵢ | E₄* | E_{d} |
| 3700 | E_{1b}E₂E₃ | AlkLEᵥᵢᵢ | E₄* | E_{d} |
| 3701 | E₁ₐE₂Eᵢ | AlkLEᵥᵢᵢ | E₄* | E_{d} |
| 3702 | E_{1b}E₂Eᵢ | AlkLEᵥᵢᵢ | E₄* | E_{d} |
| 3703 | E₁ₐE₂Eᵢᵢ | AlkLEᵥᵢᵢ | E₄* | E_{d} |
| 3704 | E_{1b}E₂Eᵢᵢ | AlkLEᵥᵢᵢ | E₄* | E_{d} |
| 3705 | E₁ₐE₂EᵢᵢE_{iib} | AlkLEᵥᵢᵢ | E₄* | E_{d} |
| 3706 | E_{1b}E₂EᵢᵢE_{iib} | AlkLEᵥᵢᵢ | E₄* | E_{d} |
| 3707 | E₁ₐE₂E₃Eᵢ | AlkLEᵥᵢᵢ | E₄* | E_{d} |
| 3708 | E_{1b}E₂E₃Eᵢ | AlkLEᵥᵢᵢ | E₄* | E_{d} |
| 3709 | E₁ₐE₂E₃Eᵢᵢ | AlkLEᵥᵢᵢ | E₄* | E_{d} |
| 3710 | E_{1b}E₂E₃Eᵢᵢ | AlkLEᵥᵢᵢ | E₄* | E_{d} |
| 3711 | E₁ₐE₂E₃EᵢᵢE_{iib} | AlkLEᵥᵢᵢ | E₄* | E_{d} |
| 3712 | E_{1b}E₂E₃EᵢᵢE_{iib} | AlkLEᵥᵢᵢ | E₄* | E_{d} |
| 3713 | E₁ₐE₂E₄ | AlkLEᵥᵢᵢ | E₄* | E_{d} |
| 3714 | E_{1b}E₂E₄ | AlkLEᵥᵢᵢ | E₄* | E_{d} |
| 3715 | E₁ₐE₂E₃E₄ | AlkLEᵥᵢᵢ | E₄* | E_{d} |
| 3716 | E_{1b}E₂E₃E₄ | AlkLEᵥᵢᵢ | E₄* | E_{d} |
| 3717 | E₁ₐE₂EᵢE₄ | AlkLEᵥᵢᵢ | E₄* | E_{d} |
| 3718 | E_{1b}E₂EᵢE₄ | AlkLEᵥᵢᵢ | E₄* | E_{d} |
| 3719 | E₁ₐE₂EᵢᵢE₄ | AlkLEᵥᵢᵢ | E₄* | E_{d} |
| 3720 | E_{1b}E₂EᵢᵢE₄ | AlkLEᵥᵢᵢ | E₄* | E_{d} |
| 3721 | E₁ₐE₂EᵢᵢE_{iib}E₄ | AlkLEᵥᵢᵢ | E₄* | E_{d} |
| 3722 | E_{1b}E₂EᵢᵢE_{iib}E₄ | AlkLEᵥᵢᵢ | E₄* | E_{d} |
| 3723 | E₁ₐE₂E₃EᵢE₄ | AlkLEᵥᵢᵢ | E₄* | E_{d} |
| 3724 | E_{1b}E₂E₃EᵢE₄ | AlkLEᵥᵢᵢ | E₄* | E_{d} |
| 3725 | E₁ₐE₂E₃EᵢᵢE₄ | AlkLEᵥᵢᵢ | E₄* | E_{d} |
| 3726 | E_{1b}E₂E₃EᵢᵢE₄ | AlkLEᵥᵢᵢ | E₄* | E_{d} |
| 3727 | E₁ₐE₂E₃EᵢᵢE_{iib}E₄ | AlkLEᵥᵢᵢ | E₄* | E_{d} |
| 3728 | E_{1b}E₂E₃EᵢᵢE_{iib}E₄ | AlkLEᵥᵢᵢ | E₄* | E_{d} |
| 3729 | E₁ₐE₂Eᵢᵢᵢ | AlkLEᵥᵢᵢ | E₄* | E_{d} |
| 3730 | E_{1b}E₂Eᵢᵢᵢ | AlkLEᵥᵢᵢ | E₄* | E_{d} |
| 3731 | E₁ₐE₂E₃Eᵢᵢᵢ | AlkLEᵥᵢᵢ | E₄* | E_{d} |
| 3732 | E_{1b}E₂E₃Eᵢᵢᵢ | AlkLEᵥᵢᵢ | E₄* | E_{d} |
| 3733 | E₁ₐE₂EᵢᵢᵢE₄ | AlkLEᵥᵢᵢ | E₄* | E_{d} |
| 3734 | E_{1b}E₂EᵢᵢᵢE₄ | AlkLEᵥᵢᵢ | E₄* | E_{d} |
| 3735 | E₁ₐE₂E₃EᵢᵢᵢE₄ | AlkLEᵥᵢᵢ | E₄* | E_{d} |
| 3736 | E_{1b}E₂E₃EᵢᵢᵢE₄ | AlkLEᵥᵢᵢ | E₄* | E_{d} |
| 3737 | E₁ₐE₂Eᵢᵥ | AlkLEᵥᵢᵢ | E₄* | E_{d} |
| 3738 | E_{1b}E₂Eᵢᵥ | AlkLEᵥᵢᵢ | E₄* | E_{d} |
| 3739 | E₁ₐE₂E₃Eᵢᵥ | AlkLEᵥᵢᵢ | E₄* | E_{d} |
| 3740 | E_{1b}E₂E₃Eᵢᵥ | AlkLEᵥᵢᵢ | E₄* | E_{d} |
| 3741 | E₁ₐE₂EᵢᵥE₄ | AlkLEᵥᵢᵢ | E₄* | E_{d} |
| 3742 | E_{1b}E₂EᵢᵥE₄ | AlkLEᵥᵢᵢ | E₄* | E_{d} |
| 3743 | E₁ₐE₂E₃EᵢᵥE₄ | AlkLEᵥᵢᵢ | E₄* | E_{d} |
| 3744 | E_{1b}E₂E₃EᵢᵥE₄ | AlkLEᵥᵢᵢ | E₄* | E_{d} |
| 3745 | E₁ₐE₂ | AlkLEᵥᵢᵢ | E₅ | E_{d} |
| 3746 | E_{1b}E₂ | AlkLEᵥᵢᵢ | E₅ | E_{d} |
| 3747 | E₁ₐE₂E₃ | AlkLEᵥᵢᵢ | E₅ | E_{d} |
| 3748 | E_{1b}E₂E₃ | AlkLEᵥᵢᵢ | E₅ | E_{d} |
| 3749 | E₁ₐE₂Eᵢ | AlkLEᵥᵢᵢ | E₅ | E_{d} |
| 3750 | E_{1b}E₂Eᵢ | AlkLEᵥᵢᵢ | E₅ | E_{d} |
| 3751 | E₁ₐE₂Eᵢᵢ | AlkLEᵥᵢᵢ | E₅ | E_{d} |
| 3752 | E_{1b}E₂Eᵢᵢ | AlkLEᵥᵢᵢ | E₅ | E_{d} |
| 3753 | E₁ₐE₂EᵢᵢE_{iib} | AlkLEᵥᵢᵢ | E₅ | E_{d} |
| 3754 | E_{1b}E₂EᵢᵢE_{iib} | AlkLEᵥᵢᵢ | E₅ | E_{d} |
| 3755 | E₁ₐE₂E₃Eᵢ | AlkLEᵥᵢᵢ | E₅ | E_{d} |
| 3756 | E_{1b}E₂E₃Eᵢ | AlkLEᵥᵢᵢ | E₅ | E_{d} |
| 3757 | E₁ₐE₂E₃Eᵢᵢ | AlkLEᵥᵢᵢ | E₅ | E_{d} |
| 3758 | E_{1b}E₂E₃Eᵢᵢ | AlkLEᵥᵢᵢ | E₅ | E_{d} |
| 3759 | E₁ₐE₂E₃EᵢᵢE_{iib} | AlkLEᵥᵢᵢ | E₅ | E_{d} |
| 3760 | E_{1b}E₂E₃EᵢᵢE_{iib} | AlkLEᵥᵢᵢ | E₅ | E_{d} |
| 3761 | E₁ₐE₂E₄ | AlkLEᵥᵢᵢ | E₅ | E_{d} |
| 3762 | E_{1b}E₂E₄ | AlkLEᵥᵢᵢ | E₅ | E_{d} |
| 3763 | E₁ₐE₂E₃E₄ | AlkLEᵥᵢᵢ | E₅ | E_{d} |
| 3764 | E_{1b}E₂E₃E₄ | AlkLEᵥᵢᵢ | E₅ | E_{d} |
| 3765 | E₁ₐE₂EᵢE₄ | AlkLEᵥᵢᵢ | E₅ | E_{d} |
| 3766 | E_{1b}E₂EᵢE₄ | AlkLEᵥᵢᵢ | E₅ | E_{d} |
| 3767 | E₁ₐE₂EᵢᵢE₄ | AlkLEᵥᵢᵢ | E₅ | E_{d} |
| 3768 | E_{1b}E₂EᵢᵢE₄ | AlkLEᵥᵢᵢ | E₅ | E_{d} |
| 3769 | E₁ₐE₂EᵢᵢE_{iib}E₄ | AlkLEᵥᵢᵢ | E₅ | E_{d} |
| 3770 | E_{1b}E₂EᵢᵢE_{iib}E₄ | AlkLEᵥᵢᵢ | E₅ | E_{d} |
| 3771 | E₁ₐE₂E₃EᵢE₄ | AlkLEᵥᵢᵢ | E₅ | E_{d} |
| 3772 | E_{1b}E₂E₃EᵢE₄ | AlkLEᵥᵢᵢ | E₅ | E_{d} |
| 3773 | E₁ₐE₂E₃EᵢᵢE₄ | AlkLEᵥᵢᵢ | E₅ | E_{d} |
| 3774 | E_{1b}E₂E₃EᵢᵢE₄ | AlkLEᵥᵢᵢ | E₅ | E_{d} |
| 3775 | E₁ₐE₂E₃EᵢᵢE_{iib}E₄ | AlkLEᵥᵢᵢ | E₅ | E_{d} |
| 3776 | E_{1b}E₂E₃EᵢᵢE_{iib}E₄ | AlkLEᵥᵢᵢ | E₅ | E_{d} |
| 3777 | E₁ₐE₂Eᵢᵢᵢ | AlkLEᵥᵢᵢ | E₅ | E_{d} |
| 3778 | E_{1b}E₂Eᵢᵢᵢ | AlkLEᵥᵢᵢ | E₅ | E_{d} |
| 3779 | E₁ₐE₂E₃Eᵢᵢᵢ | AlkLEᵥᵢᵢ | E₅ | E_{d} |
| 3780 | E_{1b}E₂E₃Eᵢᵢᵢ | AlkLEᵥᵢᵢ | E₅ | E_{d} |
| 3781 | E₁ₐE₂EᵢᵢᵢE₄ | AlkLEᵥᵢᵢ | E₅ | E_{d} |
| 3782 | E_{1b}E₂EᵢᵢᵢE₄ | AlkLEᵥᵢᵢ | E₅ | E_{d} |
| 3783 | E₁ₐE₂E₃EᵢᵢᵢE₄ | AlkLEᵥᵢᵢ | E₅ | E_{d} |
| 3784 | E_{1b}E₂E₃EᵢᵢᵢE₄ | AlkLEᵥᵢᵢ | E₅ | E_{d} |
| 3785 | E₁ₐE₂Eᵢᵥ | AlkLEᵥᵢᵢ | E₅ | E_{d} |
| 3786 | E_{1b}E₂Eᵢᵥ | AlkLEᵥᵢᵢ | E₅ | E_{d} |
| 3787 | E₁ₐE₂E₃Eᵢᵥ | AlkLEᵥᵢᵢ | E₅ | E_{d} |
| 3788 | E_{1b}E₂E₃Eᵢᵥ | AlkLEᵥᵢᵢ | E₅ | E_{d} |
| 3789 | E₁ₐE₂EᵢᵥE₄ | AlkLEᵥᵢᵢ | E₅ | E_{d} |
| 3790 | E_{1b}E₂EᵢᵥE₄ | AlkLEᵥᵢᵢ | E₅ | E_{d} |
| 3791 | E₁ₐE₂E₃EᵢᵥE₄ | AlkLEᵥᵢᵢ | E₅ | E_{d} |
| 3792 | E_{1b}E₂E₃EᵢᵥE₄ | AlkLEᵥᵢᵢ | E₅ | E_{d} |
| 3793 | E₁ₐE₂ | AlkLEᵥᵢᵢ | E₄*E₅ | E_{d} |
| 3794 | E_{1b}E₂ | AlkLEᵥᵢᵢ | E₄*E₅ | E_{d} |
| 3795 | E₁ₐE₂E₃ | AlkLEᵥᵢᵢ | E₄*E₅ | E_{d} |
| 3796 | E_{1b}E₂E₃ | AlkLEᵥᵢᵢ | E₄*E₅ | E_{d} |
| 3797 | E₁ₐE₂Eᵢ | AlkLEᵥᵢᵢ | E₄*E₅ | E_{d} |
| 3798 | E_{1b}E₂Eᵢ | AlkLEᵥᵢᵢ | E₄*E₅ | E_{d} |
| 3799 | E₁ₐE₂Eᵢᵢ | AlkLEᵥᵢᵢ | E₄*E₅ | E_{d} |
| 3800 | E_{1b}E₂Eᵢᵢ | AlkLEᵥᵢᵢ | E₄*E₅ | E_{d} |
| 3801 | E₁ₐE₂EᵢᵢE_{iib} | AlkLEᵥᵢᵢ | E₄*E₅ | E_{d} |
| 3802 | E_{1b}E₂EᵢᵢE_{iib} | AlkLEᵥᵢᵢ | E₄*E₅ | E_{d} |
| 3803 | E₁ₐE₂E₃Eᵢ | AlkLEᵥᵢᵢ | E₄*E₅ | E_{d} |
| 3804 | E_{1b}E₂E₃Eᵢ | AlkLEᵥᵢᵢ | E₄*E₅ | E_{d} |
| 3805 | E₁ₐE₂E₃Eᵢᵢ | AlkLEᵥᵢᵢ | E₄*E₅ | E_{d} |
| 3806 | E_{1b}E₂E₃Eᵢᵢ | AlkLEᵥᵢᵢ | E₄*E₅ | E_{d} |
| 3807 | E₁ₐE₂E₃EᵢᵢE_{iib} | AlkLEᵥᵢᵢ | E₄*E₅ | E_{d} |
| 3808 | E_{1b}E₂E₃EᵢᵢE_{iib} | AlkLEᵥᵢᵢ | E₄*E₅ | E_{d} |
| 3809 | E₁ₐE₂E₄ | AlkLEᵥᵢᵢ | E₄*E₅ | E_{d} |
| 3810 | E_{1b}E₂E₄ | AlkLEᵥᵢᵢ | E₄*E₅ | E_{d} |
| 3811 | E₁ₐE₂E₃E₄ | AlkLEᵥᵢᵢ | E₄*E₅ | E_{d} |
| 3812 | E_{1b}E₂E₃E₄ | AlkLEᵥᵢᵢ | E₄*E₅ | E_{d} |
| 3813 | E₁ₐE₂EᵢE₄ | AlkLEᵥᵢᵢ | E₄*E₅ | E_{d} |
| 3814 | E_{1b}E₂EᵢE₄ | AlkLEᵥᵢᵢ | E₄*E₅ | E_{d} |
| 3815 | E₁ₐE₂EᵢᵢE₄ | AlkLEᵥᵢᵢ | E₄*E₅ | E_{d} |
| 3816 | E_{1b}E₂EᵢᵢE₄ | AlkLEᵥᵢᵢ | E₄*E₅ | E_{d} |
| 3817 | E₁ₐE₂EᵢᵢE_{iib}E₄ | AlkLEᵥᵢᵢ | E₄*E₅ | E_{d} |
| 3818 | E_{1b}E₂EᵢᵢE_{iib}E₄ | AlkLEᵥᵢᵢ | E₄*E₅ | E_{d} |
| 3819 | E₁ₐE₂E₃EᵢE₄ | AlkLEᵥᵢᵢ | E₄*E₅ | E_{d} |
| 3820 | E_{1b}E₂E₃EᵢE₄ | AlkLEᵥᵢᵢ | E₄*E₅ | E_{d} |
| 3821 | E₁ₐE₂E₃EᵢᵢE₄ | AlkLEᵥᵢᵢ | E₄*E₅ | E_{d} |
| 3822 | E_{1b}E₂E₃EᵢᵢE₄ | AlkLEᵥᵢᵢ | E₄*E₅ | E_{d} |
| 3823 | E₁ₐE₂E₃EᵢᵢE_{iib}E₄ | AlkLEᵥᵢᵢ | E₄*E₅ | E_{d} |
| 3824 | E_{1b}E₂E₃EᵢᵢE_{iib}E₄ | AlkLEᵥᵢᵢ | E₄*E₅ | E_{d} |
| 3825 | E₁ₐE₂Eᵢᵢᵢ | AlkLEᵥᵢᵢ | E₄*E₅ | E_{d} |
| 3826 | E_{1b}E₂Eᵢᵢᵢ | AlkLEᵥᵢᵢ | E₄*E₅ | E_{d} |
| 3827 | E₁ₐE₂E₃Eᵢᵢᵢ | AlkLEᵥᵢᵢ | E₄*E₅ | E_{d} |
| 3828 | E_{1b}E₂E₃Eᵢᵢᵢ | AlkLEᵥᵢᵢ | E₄*E₅ | E_{d} |
| 3829 | E₁ₐE₂EᵢᵢᵢE₄ | AlkLEᵥᵢᵢ | E₄*E₅ | E_{d} |
| 3830 | E_{1b}E₂EᵢᵢᵢE₄ | AlkLEᵥᵢᵢ | E₄*E₅ | E_{d} |
| 3831 | E₁ₐE₂E₃EᵢᵢᵢE₄ | AlkLEᵥᵢᵢ | E₄*E₅ | E_{d} |
| 3832 | E_{1b}E₂E₃EᵢᵢᵢE₄ | AlkLEᵥᵢᵢ | E₄*E₅ | E_{d} |
| 3833 | E₁ₐE₂Eᵢᵥ | AlkLEᵥᵢᵢ | E₄*E₅ | E_{d} |
| 3834 | E_{1b}E₂Eᵢᵥ | AlkLEᵥᵢᵢ | E₄*E₅ | E_{d} |
| 3835 | E₁ₐE₂E₃Eᵢᵥ | AlkLEᵥᵢᵢ | E₄*E₅ | E_{d} |
| 3836 | E_{1b}E₂E₃Eᵢᵥ | AlkLEᵥᵢᵢ | E₄*E₅ | E_{d} |
| 3837 | E₁ₐE₂EᵢᵥE₄ | AlkLEᵥᵢᵢ | E₄*E₅ | E_{d} |
| 3838 | E_{1b}E₂EᵢᵥE₄ | AlkLEᵥᵢᵢ | E₄*E₅ | E_{d} |
| 3839 | E₁ₐE₂E₃EᵢᵥE₄ | AlkLEᵥᵢᵢ | E₄*E₅ | E_{d} |
| 3840 | E_{1b}E₂E₃EᵢᵥE₄ | AlkLEᵥᵢᵢ | E₄*E₅ | E_{d} |
| 3841 | E₁ₐE₂ | Eᵥᵢᵢ | | Eₑ |
| 3842 | E_{1b}E₂ | Eᵥᵢᵢ | | Eₑ |
| 3843 | E₁ₐE₂E₃ | Eᵥᵢᵢ | | Eₑ |
| 3844 | E_{1b}E₂E₃ | Eᵥᵢᵢ | | Eₑ |
| 3845 | E₁ₐE₂Eᵢ | Eᵥᵢᵢ | | Eₑ |
| 3846 | E_{1b}E₂Eᵢ | Eᵥᵢᵢ | | Eₑ |
| 3847 | E₁ₐE₂Eᵢᵢ | Eᵥᵢᵢ | | Eₑ |
| 3848 | E_{1b}E₂Eᵢᵢ | Eᵥᵢᵢ | | Eₑ |
| 3849 | E₁ₐE₂EᵢᵢE_{iib} | Eᵥᵢᵢ | | Eₑ |
| 3850 | E_{1b}E₂EᵢᵢE_{iib} | Eᵥᵢᵢ | | Eₑ |
| 3851 | E₁ₐE₂E₃Eᵢ | Eᵥᵢᵢ | | Eₑ |
| 3852 | E_{1b}E₂E₃Eᵢ | Eᵥᵢᵢ | | Eₑ |
| 3853 | E₁ₐE₂E₃Eᵢᵢ | Eᵥᵢᵢ | | Eₑ |
| 3854 | E_{1b}E₂E₃Eᵢᵢ | Eᵥᵢᵢ | | Eₑ |
| 3855 | E₁ₐE₂E₃EᵢᵢE_{iib} | Eᵥᵢᵢ | | Eₑ |
| 3856 | E_{1b}E₂E₃EᵢᵢE_{iib} | Eᵥᵢᵢ | | Eₑ |
| 3857 | E₁ₐE₂E₄ | Eᵥᵢᵢ | | Eₑ |
| 3858 | E_{1b}E₂E₄ | Eᵥᵢᵢ | | Eₑ |
| 3859 | E₁ₐE₂E₃E₄ | Eᵥᵢᵢ | | Eₑ |
| 3860 | E_{1b}E₂E₃E₄ | Eᵥᵢᵢ | | Eₑ |
| 3861 | E₁ₐE₂EᵢE₄ | Eᵥᵢᵢ | | Eₑ |
| 3862 | E_{1b}E₂EᵢE₄ | Eᵥᵢᵢ | | Eₑ |
| 3863 | E₁ₐE₂EᵢᵢE₄ | Eᵥᵢᵢ | | Eₑ |
| 3864 | E_{1b}E₂EᵢᵢE₄ | Eᵥᵢᵢ | | Eₑ |
| 3865 | E₁ₐE₂EᵢᵢE_{iib}E₄ | Eᵥᵢᵢ | | Eₑ |
| 3866 | E_{1b}E₂EᵢᵢE_{iib}E₄ | Eᵥᵢᵢ | | Eₑ |
| 3867 | E₁ₐE₂E₃EᵢE₄ | Eᵥᵢᵢ | | Eₑ |
| 3868 | E_{1b}E₂E₃EᵢE₄ | Eᵥᵢᵢ | | Eₑ |
| 3869 | E₁ₐE₂E₃EᵢᵢE₄ | Eᵥᵢᵢ | | Eₑ |
| 3870 | E_{1b}E₂E₃EᵢᵢE₄ | Eᵥᵢᵢ | | Eₑ |
| 3871 | E₁ₐE₂E₃EᵢᵢE_{iib}E₄ | Eᵥᵢᵢ | | Eₑ |
| 3872 | E_{1b}E₂E₃EᵢᵢE_{iib}E₄ | Eᵥᵢᵢ | | Eₑ |
| 3873 | E₁ₐE₂Eᵢᵢᵢ | Eᵥᵢᵢ | | Eₑ |
| 3874 | E_{1b}E₂Eᵢᵢᵢ | Eᵥᵢᵢ | | Eₑ |
| 3875 | E₁ₐE₂E₃Eᵢᵢᵢ | Eᵥᵢᵢ | | Eₑ |
| 3876 | E_{1b}E₂E₃Eᵢᵢᵢ | Eᵥᵢᵢ | | Eₑ |
| 3877 | E₁ₐE₂EᵢᵢᵢE₄ | Eᵥᵢᵢ | | Eₑ |
| 3878 | E_{1b}E₂EᵢᵢᵢE₄ | Eᵥᵢᵢ | | Eₑ |
| 3879 | E₁ₐE₂E₃EᵢᵢᵢE₄ | Eᵥᵢᵢ | | Eₑ |
| 3880 | E_{1b}E₂E₃EᵢᵢᵢE₄ | Eᵥᵢᵢ | | Eₑ |
| 3881 | E₁ₐE₂Eᵢᵥ | Eᵥᵢᵢ | | Eₑ |
| 3882 | E_{1b}E₂Eᵢᵥ | Eᵥᵢᵢ | | Eₑ |
| 3883 | E₁ₐE₂E₃Eᵢᵥ | Eᵥᵢᵢ | | Eₑ |
| 3884 | E_{1b}E₂E₃Eᵢᵥ | Eᵥᵢᵢ | | Eₑ |
| 3885 | E₁ₐE₂EᵢᵥE₄ | Eᵥᵢᵢ | | Eₑ |
| 3886 | E_{1b}E₂EᵢᵥE₄ | Eᵥᵢᵢ | | Eₑ |
| 3887 | E₁ₐE₂E₃EᵢᵥE₄ | Eᵥᵢᵢ | | Eₑ |
| 3888 | E_{1b}E₂E₃EᵢᵥE₄ | Eᵥᵢᵢ | | Eₑ |
| 3889 | E₁ₐE₂ | Eᵥᵢᵢ | E₄* | Eₑ |
| 3890 | E_{1b}E₂ | Eᵥᵢᵢ | E₄* | Eₑ |
| 3891 | E₁ₐE₂E₃ | Eᵥᵢᵢ | E₄* | Eₑ |
| 3892 | E_{1b}E₂E₃ | Eᵥᵢᵢ | E₄* | Eₑ |
| 3893 | E₁ₐE₂Eᵢ | Eᵥᵢᵢ | E₄* | Eₑ |
| 3894 | E_{1b}E₂Eᵢ | Eᵥᵢᵢ | E₄* | Eₑ |
| 3895 | E₁ₐE₂Eᵢᵢ | Eᵥᵢᵢ | E₄* | Eₑ |
| 3896 | E_{1b}E₂Eᵢᵢ | Eᵥᵢᵢ | E₄* | Eₑ |
| 3897 | E₁ₐE₂EᵢᵢE_{iib} | Eᵥᵢᵢ | E₄* | Eₑ |
| 3898 | E_{1b}E₂EᵢᵢE_{iib} | Eᵥᵢᵢ | E₄* | Eₑ |
| 3899 | E₁ₐE₂E₃Eᵢ | Eᵥᵢᵢ | E₄* | Eₑ |
| 3900 | E_{1b}E₂E₃Eᵢ | Eᵥᵢᵢ | E₄* | Eₑ |
| 3901 | E₁ₐE₂E₃Eᵢᵢ | Eᵥᵢᵢ | E₄* | Eₑ |
| 3902 | E_{1b}E₂E₃Eᵢᵢ | Eᵥᵢᵢ | E₄* | Eₑ |
| 3903 | E₁ₐE₂E₃EᵢᵢE_{iib} | Eᵥᵢᵢ | E₄* | Eₑ |
| 3904 | E_{1b}E₂E₃EᵢᵢE_{iib} | Eᵥᵢᵢ | E₄* | Eₑ |
| 3905 | E₁ₐE₂E₄ | Eᵥᵢᵢ | E₄* | Eₑ |
| 3906 | E_{1b}E₂E₄ | Eᵥᵢᵢ | E₄* | Eₑ |
| 3907 | E₁ₐE₂E₃E₄ | Eᵥᵢᵢ | E₄* | Eₑ |
| 3908 | E_{1b}E₂E₃E₄ | Eᵥᵢᵢ | E₄* | Eₑ |
| 3909 | E₁ₐE₂EᵢE₄ | Eᵥᵢᵢ | E₄* | Eₑ |
| 3910 | E_{1b}E₂EᵢE₄ | Eᵥᵢᵢ | E₄* | Eₑ |
| 3911 | E₁ₐE₂EᵢᵢE₄ | Eᵥᵢᵢ | E₄* | Eₑ |
| 3912 | E_{1b}E₂EᵢᵢE₄ | Eᵥᵢᵢ | E₄* | Eₑ |
| 3913 | E₁ₐE₂EᵢᵢE_{iib}E₄ | Eᵥᵢᵢ | E₄* | Eₑ |
| 3914 | E_{1b}E₂EᵢᵢE_{iib}E₄ | Eᵥᵢᵢ | E₄* | Eₑ |
| 3915 | E₁ₐE₂E₃EᵢE₄ | Eᵥᵢᵢ | E₄* | Eₑ |
| 3916 | E_{1b}E₂E₃EᵢE₄ | Eᵥᵢᵢ | E₄* | Eₑ |
| 3917 | E₁ₐE₂E₃EᵢᵢE₄ | Eᵥᵢᵢ | E₄* | Eₑ |
| 3918 | E_{1b}E₂E₃EᵢᵢE₄ | Eᵥᵢᵢ | E₄* | Eₑ |
| 3919 | E₁ₐE₂E₃EᵢᵢE_{iib}E₄ | Eᵥᵢᵢ | E₄* | Eₑ |
| 3920 | E_{1b}E₂E₃EᵢᵢE_{iib}E₄ | Eᵥᵢᵢ | E₄* | Eₑ |
| 3921 | E₁ₐE₂Eᵢᵢᵢ | Eᵥᵢᵢ | E₄* | Eₑ |
| 3922 | E_{1b}E₂Eᵢᵢᵢ | Eᵥᵢᵢ | E₄* | Eₑ |
| 3923 | E₁ₐE₂E₃Eᵢᵢᵢ | Eᵥᵢᵢ | E₄* | Eₑ |
| 3924 | E_{1b}E₂E₃Eᵢᵢᵢ | Eᵥᵢᵢ | E₄* | Eₑ |
| 3925 | E₁ₐE₂EᵢᵢᵢE₄ | Eᵥᵢᵢ | E₄* | Eₑ |
| 3926 | E_{1b}E₂EᵢᵢᵢE₄ | Eᵥᵢᵢ | E₄* | Eₑ |
| 3927 | E₁ₐE₂E₃EᵢᵢᵢE₄ | Eᵥᵢᵢ | E₄* | Eₑ |
| 3928 | E_{1b}E₂E₃EᵢᵢᵢE₄ | Eᵥᵢᵢ | E₄* | Eₑ |
| 3929 | E₁ₐE₂Eᵢᵥ | Eᵥᵢᵢ | E₄* | Eₑ |
| 3930 | E_{1b}E₂Eᵢᵥ | Eᵥᵢᵢ | E₄* | Eₑ |
| 3931 | E₁ₐE₂E₃Eᵢᵥ | Eᵥᵢᵢ | E₄* | Eₑ |
| 3932 | E_{1b}E₂E₃Eᵢᵥ | Eᵥᵢᵢ | E₄* | Eₑ |
| 3933 | E₁ₐE₂EᵢᵥE₄ | Eᵥᵢᵢ | E₄* | Eₑ |
| 3934 | E_{1b}E₂EᵢᵥE₄ | Eᵥᵢᵢ | E₄* | Eₑ |
| 3935 | E₁ₐE₂E₃EᵢᵥE₄ | Eᵥᵢᵢ | E₄* | Eₑ |
| 3936 | E_{1b}E₂E₃EᵢᵥE₄ | Eᵥᵢᵢ | E₄* | Eₑ |
| 3937 | E₁ₐE₂ | Eᵥᵢᵢ | E₅ | Eₑ |
| 3938 | E_{1b}E₂ | Eᵥᵢᵢ | E₅ | Eₑ |
| 3939 | E₁ₐE₂E₃ | Eᵥᵢᵢ | E₅ | Eₑ |
| 3940 | E_{1b}E₂E₃ | Eᵥᵢᵢ | E₅ | Eₑ |
| 3941 | E₁ₐE₂Eᵢ | Eᵥᵢᵢ | E₅ | Eₑ |
| 3942 | E_{1b}E₂Eᵢ | Eᵥᵢᵢ | E₅ | Eₑ |
| 3943 | E₁ₐE₂Eᵢᵢ | Eᵥᵢᵢ | E₅ | Eₑ |
| 3944 | E_{1b}E₂Eᵢᵢ | Eᵥᵢᵢ | E₅ | Eₑ |
| 3945 | E₁ₐE₂EᵢᵢE_{iib} | Eᵥᵢᵢ | E₅ | Eₑ |
| 3946 | E_{1b}E₂EᵢᵢE_{iib} | Eᵥᵢᵢ | E₅ | Eₑ |
| 3947 | E₁ₐE₂E₃Eᵢ | Eᵥᵢᵢ | E₅ | Eₑ |
| 3948 | E_{1b}E₂E₃Eᵢ | Eᵥᵢᵢ | E₅ | Eₑ |
| 3949 | E₁ₐE₂E₃Eᵢᵢ | Eᵥᵢᵢ | E₅ | Eₑ |
| 3950 | E_{1b}E₂E₃Eᵢᵢ | Eᵥᵢᵢ | E₅ | Eₑ |
| 3951 | E₁ₐE₂E₃EᵢᵢE_{iib} | Eᵥᵢᵢ | E₅ | Eₑ |
| 3952 | E_{1b}E₂E₃EᵢᵢE_{iib} | Eᵥᵢᵢ | E₅ | Eₑ |
| 3953 | E₁ₐE₂E₄ | Eᵥᵢᵢ | E₅ | Eₑ |
| 3954 | E_{1b}E₂E₄ | Eᵥᵢᵢ | E₅ | Eₑ |
| 3955 | E₁ₐE₂E₃E₄ | Eᵥᵢᵢ | E₅ | Eₑ |
| 3956 | E_{1b}E₂E₃E₄ | Eᵥᵢᵢ | E₅ | Eₑ |
| 3957 | E₁ₐE₂EᵢE₄ | Eᵥᵢᵢ | E₅ | Eₑ |
| 3958 | E_{1b}E₂EᵢE₄ | Eᵥᵢᵢ | E₅ | Eₑ |
| 3959 | E₁ₐE₂EᵢᵢE₄ | Eᵥᵢᵢ | E₅ | Eₑ |
| 3960 | E_{1b}E₂EᵢᵢE₄ | Eᵥᵢᵢ | E₅ | Eₑ |
| 3961 | E₁ₐE₂EᵢᵢE_{iib}E₄ | Eᵥᵢᵢ | E₅ | Eₑ |
| 3962 | E_{1b}E₂EᵢᵢE_{iib}E₄ | Eᵥᵢᵢ | E₅ | Eₑ |
| 3963 | E₁ₐE₂E₃EᵢE₄ | Eᵥᵢᵢ | E₅ | Eₑ |
| 3964 | E_{1b}E₂E₃EᵢE₄ | Eᵥᵢᵢ | E₅ | Eₑ |
| 3965 | E₁ₐE₂E₃EᵢᵢE₄ | Eᵥᵢᵢ | E₅ | Eₑ |
| 3966 | E_{1b}E₂E₃EᵢᵢE₄ | Eᵥᵢᵢ | E₅ | Eₑ |
| 3967 | E₁ₐE₂E₃EᵢᵢE_{iib}E₄ | Eᵥᵢᵢ | E₅ | Eₑ |
| 3968 | E_{1b}E₂E₃EᵢᵢE_{iib}E₄ | Eᵥᵢᵢ | E₅ | Eₑ |
| 3969 | E₁ₐE₂Eᵢᵢᵢ | Eᵥᵢᵢ | E₅ | Eₑ |
| 3970 | E_{1b}E₂Eᵢᵢᵢ | Eᵥᵢᵢ | E₅ | Eₑ |
| 3971 | E₁ₐE₂E₃Eᵢᵢᵢ | Eᵥᵢᵢ | E₅ | Eₑ |
| 3972 | E_{1b}E₂E₃Eᵢᵢᵢ | Eᵥᵢᵢ | E₅ | Eₑ |
| 3973 | E₁ₐE₂EᵢᵢᵢE₄ | Eᵥᵢᵢ | E₅ | Eₑ |
| 3974 | E_{1b}E₂EᵢᵢᵢE₄ | Eᵥᵢᵢ | E₅ | Eₑ |
| 3975 | E₁ₐE₂E₃EᵢᵢᵢE₄ | Eᵥᵢᵢ | E₅ | Eₑ |
| 3976 | E_{1b}E₂E₃EᵢᵢᵢE₄ | Eᵥᵢᵢ | E₅ | Eₑ |
| 3977 | E₁ₐE₂Eᵢᵥ | Eᵥᵢᵢ | E₅ | Eₑ |
| 3978 | E_{1b}E₂Eᵢᵥ | Eᵥᵢᵢ | E₅ | Eₑ |
| 3979 | E₁ₐE₂E₃Eᵢᵥ | Eᵥᵢᵢ | E₅ | Eₑ |
| 3980 | E_{1b}E₂E₃Eᵢᵥ | Eᵥᵢᵢ | E₅ | Eₑ |
| 3981 | E₁ₐE₂EᵢᵥE₄ | Eᵥᵢᵢ | E₅ | Eₑ |
| 3982 | E_{1b}E₂EᵢᵥE₄ | Eᵥᵢᵢ | E₅ | Eₑ |
| 3983 | E₁ₐE₂E₃EᵢᵥE₄ | Eᵥᵢᵢ | E₅ | Eₑ |
| 3984 | E_{1b}E₂E₃EᵢᵥE₄ | Eᵥᵢᵢ | E₅ | Eₑ |
| 3985 | E₁ₐE₂ | Eᵥᵢᵢ | E₄*E₅ | Eₑ |
| 3986 | E_{1b}E₂ | Eᵥᵢᵢ | E₄*E₅ | Eₑ |
| 3987 | E₁ₐE₂E₃ | Eᵥᵢᵢ | E₄*E₅ | Eₑ |
| 3988 | E_{1b}E₂E₃ | Eᵥᵢᵢ | E₄*E₅ | Eₑ |
| 3989 | E₁ₐE₂Eᵢ | Eᵥᵢᵢ | E₄*E₅ | Eₑ |
| 3990 | E_{1b}E₂Eᵢ | Eᵥᵢᵢ | E₄*E₅ | Eₑ |
| 3991 | E₁ₐE₂Eᵢᵢ | Eᵥᵢᵢ | E₄*E₅ | Eₑ |
| 3992 | E_{1b}E₂Eᵢᵢ | Eᵥᵢᵢ | E₄*E₅ | Eₑ |
| 3993 | E₁ₐE₂EᵢᵢE_{iib} | Eᵥᵢᵢ | E₄*E₅ | Eₑ |
| 3994 | E_{1b}E₂EᵢᵢE_{iib} | Eᵥᵢᵢ | E₄*E₅ | Eₑ |
| 3995 | E₁ₐE₂E₃Eᵢ | Eᵥᵢᵢ | E₄*E₅ | Eₑ |
| 3996 | E_{1b}E₂E₃Eᵢ | Eᵥᵢᵢ | E₄*E₅ | Eₑ |
| 3997 | E₁ₐE₂E₃Eᵢᵢ | Eᵥᵢᵢ | E₄*E₅ | Eₑ |
| 3998 | E_{1b}E₂E₃Eᵢᵢ | Eᵥᵢᵢ | E₄*E₅ | Eₑ |
| 3999 | E₁ₐE₂E₃EᵢᵢE_{iib} | Eᵥᵢᵢ | E₄*E₅ | Eₑ |
| 4000 | E_{1b}E₂E₃EᵢᵢE_{iib} | Eᵥᵢᵢ | E₄*E₅ | Eₑ |
| 4001 | E₁ₐE₂E₄ | Eᵥᵢᵢ | E₄*E₅ | Eₑ |
| 4002 | E_{1b}E₂E₄ | Eᵥᵢᵢ | E₄*E₅ | Eₑ |
| 4003 | E₁ₐE₂E₃E₄ | Eᵥᵢᵢ | E₄*E₅ | Eₑ |
| 4004 | E_{1b}E₂E₃E₄ | Eᵥᵢᵢ | E₄*E₅ | Eₑ |
| 4005 | E₁ₐE₂EᵢE₄ | Eᵥᵢᵢ | E₄*E₅ | Eₑ |
| 4006 | E_{1b}E₂EᵢE₄ | Eᵥᵢᵢ | E₄*E₅ | Eₑ |
| 4007 | E₁ₐE₂EᵢᵢE₄ | Eᵥᵢᵢ | E₄*E₅ | Eₑ |
| 4008 | E_{1b}E₂EᵢᵢE₄ | Eᵥᵢᵢ | E₄*E₅ | Eₑ |
| 4009 | E₁ₐE₂EᵢᵢE_{iib}E₄ | Eᵥᵢᵢ | E₄*E₅ | Eₑ |
| 4010 | E_{1b}E₂EᵢᵢE_{iib}E₄ | Eᵥᵢᵢ | E₄*E₅ | Eₑ |
| 4011 | E₁ₐE₂E₃EᵢE₄ | Eᵥᵢᵢ | E₄*E₅ | Eₑ |
| 4012 | E_{1b}E₂E₃EᵢE₄ | Eᵥᵢᵢ | E₄*E₅ | Eₑ |
| 4013 | E₁ₐE₂E₃EᵢᵢE₄ | Eᵥᵢᵢ | E₄*E₅ | Eₑ |
| 4014 | E_{1b}E₂E₃EᵢᵢE₄ | Eᵥᵢᵢ | E₄*E₅ | Eₑ |
| 4015 | E₁ₐE₂E₃EᵢᵢE_{iib}E₄ | Eᵥᵢᵢ | E₄*E₅ | Eₑ |
| 4016 | E_{1b}E₂E₃EᵢᵢE_{iib}E₄ | Eᵥᵢᵢ | E₄*E₅ | Eₑ |
| 4017 | E₁ₐE₂Eᵢᵢᵢ | Eᵥᵢᵢ | E₄*E₅ | Eₑ |
| 4018 | E_{1b}E₂Eᵢᵢᵢ | Eᵥᵢᵢ | E₄*E₅ | Eₑ |
| 4019 | E₁ₐE₂E₃Eᵢᵢᵢ | Eᵥᵢᵢ | E₄*E₅ | Eₑ |
| 4020 | E_{1b}E₂E₃Eᵢᵢᵢ | Eᵥᵢᵢ | E₄*E₅ | Eₑ |
| 4021 | E₁ₐE₂EᵢᵢᵢE₄ | Eᵥᵢᵢ | E₄*E₅ | Eₑ |
| 4022 | E_{1b}E₂EᵢᵢᵢE₄ | Eᵥᵢᵢ | E₄*E₅ | Eₑ |
| 4023 | E₁ₐE₂E₃EᵢᵢᵢE₄ | Eᵥᵢᵢ | E₄*E₅ | Eₑ |
| 4024 | E_{1b}E₂E₃EᵢᵢᵢE₄ | Eᵥᵢᵢ | E₄*E₅ | Eₑ |
| 4025 | E₁ₐE₂Eᵢᵥ | Eᵥᵢᵢ | E₄*E₅ | Eₑ |
| 4026 | E_{1b}E₂Eᵢᵥ | Eᵥᵢᵢ | E₄*E₅ | Eₑ |
| 4027 | E₁ₐE₂E₃Eᵢᵥ | Eᵥᵢᵢ | E₄*E₅ | Eₑ |
| 4028 | E_{1b}E₂E₃Eᵢᵥ | Eᵥᵢᵢ | E₄*E₅ | Eₑ |
| 4029 | E₁ₐE₂EᵢᵥE₄ | Eᵥᵢᵢ | E₄*E₅ | Eₑ |
| 4030 | E_{1b}E₂EᵢᵥE₄ | Eᵥᵢᵢ | E₄*E₅ | Eₑ |
| 4031 | E₁ₐE₂E₃EᵢᵥE₄ | Eᵥᵢᵢ | E₄*E₅ | Eₑ |
| 4032 | E_{1b}E₂E₃EᵢᵥE₄ | Eᵥᵢᵢ | E₄*E₅ | Eₑ |
| 4033 | E₁ₐE₂ | AlkLEᵥᵢᵢ | | Eₑ |
| 4034 | E_{1b}E₂ | AlkLEᵥᵢᵢ | | Eₑ |
| 4035 | E₁ₐE₂E₃ | AlkLEᵥᵢᵢ | | Eₑ |
| 4036 | E_{1b}E₂E₃ | AlkLEᵥᵢᵢ | | Eₑ |
| 4037 | E₁ₐE₂Eᵢ | AlkLEᵥᵢᵢ | | Eₑ |
| 4038 | E_{1b}E₂Eᵢ | AlkLEᵥᵢᵢ | | Eₑ |
| 4039 | E₁ₐE₂Eᵢᵢ | AlkLEᵥᵢᵢ | | Eₑ |
| 4040 | E_{1b}E₂Eᵢᵢ | AlkLEᵥᵢᵢ | | Eₑ |
| 4041 | E₁ₐE₂EᵢᵢE_{iib} | AlkLEᵥᵢᵢ | | Eₑ |
| 4042 | E_{1b}E₂EᵢᵢE_{iib} | AlkLEᵥᵢᵢ | | Eₑ |
| 4043 | E₁ₐE₂E₃Eᵢ | AlkLEᵥᵢᵢ | | Eₑ |
| 4044 | E_{1b}E₂E₃Eᵢ | AlkLEᵥᵢᵢ | | Eₑ |
| 4045 | E₁ₐE₂E₃Eᵢᵢ | AlkLEᵥᵢᵢ | | Eₑ |
| 4046 | E_{1b}E₂E₃Eᵢᵢ | AlkLEᵥᵢᵢ | | Eₑ |
| 4047 | E₁ₐE₂E₃EᵢᵢE_{iib} | AlkLEᵥᵢᵢ | | Eₑ |
| 4048 | E_{1b}E₂E₃EᵢᵢE_{iib} | AlkLEᵥᵢᵢ | | Eₑ |
| 4049 | E₁ₐE₂E₄ | AlkLEᵥᵢᵢ | | Eₑ |
| 4050 | E_{1b}E₂E₄ | AlkLEᵥᵢᵢ | | Eₑ |
| 4051 | E₁ₐE₂E₃E₄ | AlkLEᵥᵢᵢ | | Eₑ |
| 4052 | E_{1b}E₂E₃E₄ | AlkLEᵥᵢᵢ | | Eₑ |
| 4053 | E₁ₐE₂EᵢE₄ | AlkLEᵥᵢᵢ | | Eₑ |
| 4054 | E_{1b}E₂EᵢE₄ | AlkLEᵥᵢᵢ | | Eₑ |
| 4055 | E₁ₐE₂EᵢᵢE₄ | AlkLEᵥᵢᵢ | | Eₑ |
| 4056 | E_{1b}E₂EᵢᵢE₄ | AlkLEᵥᵢᵢ | | Eₑ |
| 4057 | E₁ₐE₂EᵢᵢE_{iib}E₄ | AlkLEᵥᵢᵢ | | Eₑ |
| 4058 | E_{1b}E₂EᵢᵢE_{iib}E₄ | AlkLEᵥᵢᵢ | | Eₑ |
| 4059 | E₁ₐE₂E₃EᵢE₄ | AlkLEᵥᵢᵢ | | Eₑ |
| 4060 | E_{1b}E₂E₃EᵢE₄ | AlkLEᵥᵢᵢ | | Eₑ |
| 4061 | E₁ₐE₂E₃EᵢᵢE₄ | AlkLEᵥᵢᵢ | | Eₑ |
| 4062 | E_{1b}E₂E₃EᵢᵢE₄ | AlkLEᵥᵢᵢ | | Eₑ |
| 4063 | E₁ₐE₂E₃EᵢᵢE_{iib}E₄ | AlkLEᵥᵢᵢ | | Eₑ |
| 4064 | E_{1b}E₂E₃EᵢᵢE_{iib}E₄ | AlkLEᵥᵢᵢ | | Eₑ |
| 4065 | E₁ₐE₂Eᵢᵢᵢ | AlkLEᵥᵢᵢ | | Eₑ |
| 4066 | E_{1b}E₂Eᵢᵢᵢ | AlkLEᵥᵢᵢ | | Eₑ |
| 4067 | E₁ₐE₂E₃Eᵢᵢᵢ | AlkLEᵥᵢᵢ | | Eₑ |
| 4068 | E_{1b}E₂E₃Eᵢᵢᵢ | AlkLEᵥᵢᵢ | | Eₑ |
| 4069 | E₁ₐE₂EᵢᵢᵢE₄ | AlkLEᵥᵢᵢ | | Eₑ |
| 4070 | E_{1b}E₂EᵢᵢᵢE₄ | AlkLEᵥᵢᵢ | | Eₑ |
| 4071 | E₁ₐE₂E₃EᵢᵢᵢE₄ | AlkLEᵥᵢᵢ | | Eₑ |
| 4072 | E_{1b}E₂E₃EᵢᵢᵢE₄ | AlkLEᵥᵢᵢ | | Eₑ |
| 4073 | E₁ₐE₂Eᵢᵥ | AlkLEᵥᵢᵢ | | Eₑ |
| 4074 | E_{1b}E₂Eᵢᵥ | AlkLEᵥᵢᵢ | | Eₑ |
| 4075 | E₁ₐE₂E₃Eᵢᵥ | AlkLEᵥᵢᵢ | | Eₑ |
| 4076 | E_{1b}E₂E₃Eᵢᵥ | AlkLEᵥᵢᵢ | | Eₑ |
| 4077 | E₁ₐE₂EᵢᵥE₄ | AlkLEᵥᵢᵢ | | Eₑ |
| 4078 | E_{1b}E₂EᵢᵥE₄ | AlkLEᵥᵢᵢ | | Eₑ |
| 4079 | E₁ₐE₂E₃EᵢᵥE₄ | AlkLEᵥᵢᵢ | | Eₑ |
| 4080 | E_{1b}E₂E₃EᵢᵥE₄ | AlkLEᵥᵢᵢ | | Eₑ |
| 4081 | E₁ₐE₂ | AlkLEᵥᵢᵢ | E₄* | Eₑ |
| 4082 | E_{1b}E₂ | AlkLEᵥᵢᵢ | E₄* | Eₑ |
| 4083 | E₁ₐE₂E₃ | AlkLEᵥᵢᵢ | E₄* | Eₑ |
| 4084 | E_{1b}E₂E₃ | AlkLEᵥᵢᵢ | E₄* | Eₑ |
| 4085 | E₁ₐE₂Eᵢ | AlkLEᵥᵢᵢ | E₄* | Eₑ |
| 4086 | E_{1b}E₂Eᵢ | AlkLEᵥᵢᵢ | E₄* | Eₑ |
| 4087 | E₁ₐE₂Eᵢᵢ | AlkLEᵥᵢᵢ | E₄* | Eₑ |
| 4088 | E_{1b}E₂Eᵢᵢ | AlkLEᵥᵢᵢ | E₄* | Eₑ |
| 4089 | E₁ₐE₂EᵢᵢE_{iib} | AlkLEᵥᵢᵢ | E₄* | Eₑ |
| 4090 | E_{1b}E₂EᵢᵢE_{iib} | AlkLEᵥᵢᵢ | E₄* | Eₑ |
| 4091 | E₁ₐE₂E₃Eᵢ | AlkLEᵥᵢᵢ | E₄* | Eₑ |
| 4092 | E_{1b}E₂E₃Eᵢ | AlkLEᵥᵢᵢ | E₄* | Eₑ |
| 4093 | E₁ₐE₂E₃Eᵢᵢ | AlkLEᵥᵢᵢ | E₄* | Eₑ |
| 4094 | E_{1b}E₂E₃Eᵢᵢ | AlkLEᵥᵢᵢ | E₄* | Eₑ |
| 4095 | E₁ₐE₂E₃EᵢᵢE_{iib} | AlkLEᵥᵢᵢ | E₄* | Eₑ |
| 4096 | E_{1b}E₂E₃EᵢᵢE_{iib} | AlkLEᵥᵢᵢ | E₄* | Eₑ |
| 4097 | E₁ₐE₂E₄ | AlkLEᵥᵢᵢ | E₄* | Eₑ |
| 4098 | E_{1b}E₂E₄ | AlkLEᵥᵢᵢ | E₄* | Eₑ |
| 4099 | E₁ₐE₂E₃E₄ | AlkLEᵥᵢᵢ | E₄* | Eₑ |
| 4100 | E_{1b}E₂E₃E₄ | AlkLEᵥᵢᵢ | E₄* | Eₑ |
| 4101 | E₁ₐE₂EᵢE₄ | AlkLEᵥᵢᵢ | E₄* | Eₑ |
| 4102 | E_{1b}E₂EᵢE₄ | AlkLEᵥᵢᵢ | E₄* | Eₑ |
| 4103 | E₁ₐE₂EᵢᵢE₄ | AlkLEᵥᵢᵢ | E₄* | Eₑ |
| 4104 | E_{1b}E₂EᵢᵢE₄ | AlkLEᵥᵢᵢ | E₄* | Eₑ |
| 4105 | E₁ₐE₂EᵢᵢE_{iib}E₄ | AlkLEᵥᵢᵢ | E₄* | Eₑ |
| 4106 | E_{1b}E₂EᵢᵢE_{iib}E₄ | AlkLEᵥᵢᵢ | E₄* | Eₑ |
| 4107 | E₁ₐE₂E₃EᵢE₄ | AlkLEᵥᵢᵢ | E₄* | Eₑ |
| 4108 | E_{1b}E₂E₃EᵢE₄ | AlkLEᵥᵢᵢ | E₄* | Eₑ |
| 4109 | E₁ₐE₂E₃EᵢᵢE₄ | AlkLEᵥᵢᵢ | E₄* | Eₑ |
| 4110 | E_{1b}E₂E₃EᵢᵢE₄ | AlkLEᵥᵢᵢ | E₄* | Eₑ |
| 4111 | E₁ₐE₂E₃EᵢᵢE_{iib}E₄ | AlkLEᵥᵢᵢ | E₄* | Eₑ |
| 4112 | E_{1b}E₂E₃EᵢᵢE_{iib}E₄ | AlkLEᵥᵢᵢ | E₄* | Eₑ |
| 4113 | E₁ₐE₂Eᵢᵢᵢ | AlkLEᵥᵢᵢ | E₄* | Eₑ |
| 4114 | E_{1b}E₂Eᵢᵢᵢ | AlkLEᵥᵢᵢ | E₄* | Eₑ |
| 4115 | E₁ₐE₂E₃Eᵢᵢᵢ | AlkLEᵥᵢᵢ | E₄* | Eₑ |
| 4116 | E_{1b}E₂E₃Eᵢᵢᵢ | AlkLEᵥᵢᵢ | E₄* | Eₑ |
| 4117 | E₁ₐE₂EᵢᵢᵢE₄ | AlkLEᵥᵢᵢ | E₄* | Eₑ |
| 4118 | E_{1b}E₂EᵢᵢᵢE₄ | AlkLEᵥᵢᵢ | E₄* | Eₑ |
| 4119 | E₁ₐE₂E₃EᵢᵢᵢE₄ | AlkLEᵥᵢᵢ | E₄* | Eₑ |
| 4120 | E_{1b}E₂E₃EᵢᵢᵢE₄ | AlkLEᵥᵢᵢ | E₄* | Eₑ |
| 4121 | E₁ₐE₂Eᵢᵥ | AlkLEᵥᵢᵢ | E₄* | Eₑ |
| 4122 | E_{1b}E₂Eᵢᵥ | AlkLEᵥᵢᵢ | E₄* | Eₑ |
| 4123 | E₁ₐE₂E₃Eᵢᵥ | AlkLEᵥᵢᵢ | E₄* | Eₑ |
| 4124 | E_{1b}E₂E₃Eᵢᵥ | AlkLEᵥᵢᵢ | E₄* | Eₑ |
| 4125 | E₁ₐE₂EᵢᵥE₄ | AlkLEᵥᵢᵢ | E₄* | Eₑ |
| 4126 | E_{1b}E₂EᵢᵥE₄ | AlkLEᵥᵢᵢ | E₄* | Eₑ |
| 4127 | E₁ₐE₂E₃EᵢᵥE₄ | AlkLEᵥᵢᵢ | E₄* | Eₑ |
| 4128 | E_{1b}E₂E₃EᵢᵥE₄ | AlkLEᵥᵢᵢ | E₄* | Eₑ |
| 4129 | E₁ₐE₂ | AlkLEᵥᵢᵢ | E₅ | Eₑ |
| 4130 | E_{1b}E₂ | AlkLEᵥᵢᵢ | E₅ | Eₑ |
| 4131 | E₁ₐE₂E₃ | AlkLEᵥᵢᵢ | E₅ | Eₑ |
| 4132 | E_{1b}E₂E₃ | AlkLEᵥᵢᵢ | E₅ | Eₑ |
| 4133 | E₁ₐE₂Eᵢ | AlkLEᵥᵢᵢ | E₅ | Eₑ |
| 4134 | E_{1b}E₂Eᵢ | AlkLEᵥᵢᵢ | E₅ | Eₑ |
| 4135 | E₁ₐE₂Eᵢᵢ | AlkLEᵥᵢᵢ | E₅ | Eₑ |
| 4136 | E_{1b}E₂Eᵢᵢ | AlkLEᵥᵢᵢ | E₅ | Eₑ |
| 4137 | E₁ₐE₂EᵢᵢE_{iib} | AlkLEᵥᵢᵢ | E₅ | Eₑ |
| 4138 | E_{1b}E₂EᵢᵢE_{iib} | AlkLEᵥᵢᵢ | E₅ | Eₑ |
| 4139 | E₁ₐE₂E₃Eᵢ | AlkLEᵥᵢᵢ | E₅ | Eₑ |
| 4140 | E_{1b}E₂E₃Eᵢ | AlkLEᵥᵢᵢ | E₅ | Eₑ |
| 4141 | E₁ₐE₂E₃Eᵢᵢ | AlkLEᵥᵢᵢ | E₅ | Eₑ |
| 4142 | E_{1b}E₂E₃Eᵢᵢ | AlkLEᵥᵢᵢ | E₅ | Eₑ |
| 4143 | E₁ₐE₂E₃EᵢᵢE_{iib} | AlkLEᵥᵢᵢ | E₅ | Eₑ |
| 4144 | E_{1b}E₂E₃EᵢᵢE_{iib} | AlkLEᵥᵢᵢ | E₅ | Eₑ |
| 4145 | E₁ₐE₂E₄ | AlkLEᵥᵢᵢ | E₅ | Eₑ |
| 4146 | E_{1b}E₂E₄ | AlkLEᵥᵢᵢ | E₅ | Eₑ |
| 4147 | E₁ₐE₂E₃E₄ | AlkLEᵥᵢᵢ | E₅ | Eₑ |
| 4148 | E_{1b}E₂E₃E₄ | AlkLEᵥᵢᵢ | E₅ | Eₑ |
| 4149 | E₁ₐE₂EᵢE₄ | AlkLEᵥᵢᵢ | E₅ | Eₑ |
| 4150 | E_{1b}E₂EᵢE₄ | AlkLEᵥᵢᵢ | E₅ | Eₑ |
| 4151 | E₁ₐE₂EᵢᵢE₄ | AlkLEᵥᵢᵢ | E₅ | Eₑ |
| 4152 | E_{1b}E₂EᵢᵢE₄ | AlkLEᵥᵢᵢ | E₅ | Eₑ |
| 4153 | E₁ₐE₂EᵢᵢE_{iib}E₄ | AlkLEᵥᵢᵢ | E₅ | Eₑ |
| 4154 | E_{1b}E₂EᵢᵢE_{iib}E₄ | AlkLEᵥᵢᵢ | E₅ | Eₑ |
| 4155 | E₁ₐE₂E₃EᵢE₄ | AlkLEᵥᵢᵢ | E₅ | Eₑ |
| 4156 | E_{1b}E₂E₃EᵢE₄ | AlkLEᵥᵢᵢ | E₅ | Eₑ |
| 4157 | E₁ₐE₂E₃EᵢᵢE₄ | AlkLEᵥᵢᵢ | E₅ | Eₑ |
| 4158 | E_{1b}E₂E₃EᵢᵢE₄ | AlkLEᵥᵢᵢ | E₅ | Eₑ |
| 4159 | E₁ₐE₂E₃EᵢᵢE_{iib}E₄ | AlkLEᵥᵢᵢ | E₅ | Eₑ |
| 4160 | E_{1b}E₂E₃EᵢᵢE_{iib}E₄ | AlkLEᵥᵢᵢ | E₅ | Eₑ |
| 4161 | E₁ₐE₂Eᵢᵢᵢ | AlkLEᵥᵢᵢ | E₅ | Eₑ |
| 4162 | E_{1b}E₂Eᵢᵢᵢ | AlkLEᵥᵢᵢ | E₅ | Eₑ |
| 4163 | E₁ₐE₂E₃Eᵢᵢᵢ | AlkLEᵥᵢᵢ | E₅ | Eₑ |
| 4164 | E_{1b}E₂E₃Eᵢᵢᵢ | AlkLEᵥᵢᵢ | E₅ | Eₑ |
| 4165 | E₁ₐE₂EᵢᵢᵢE₄ | AlkLEᵥᵢᵢ | E₅ | Eₑ |
| 4166 | E_{1b}E₂EᵢᵢᵢE₄ | AlkLEᵥᵢᵢ | E₅ | Eₑ |
| 4167 | E₁ₐE₂E₃EᵢᵢᵢE₄ | AlkLEᵥᵢᵢ | E₅ | Eₑ |
| 4168 | E_{1b}E₂E₃EᵢᵢᵢE₄ | AlkLEᵥᵢᵢ | E₅ | Eₑ |
| 4169 | E₁ₐE₂Eᵢᵥ | AlkLEᵥᵢᵢ | E₅ | Eₑ |
| 4170 | E_{1b}E₂Eᵢᵥ | AlkLEᵥᵢᵢ | E₅ | Eₑ |
| 4171 | E₁ₐE₂E₃Eᵢᵥ | AlkLEᵥᵢᵢ | E₅ | Eₑ |
| 4172 | E_{1b}E₂E₃Eᵢᵥ | AlkLEᵥᵢᵢ | E₅ | Eₑ |
| 4173 | E₁ₐE₂EᵢᵥE₄ | AlkLEᵥᵢᵢ | E₅ | Eₑ |
| 4174 | E_{1b}E₂EᵢᵥE₄ | AlkLEᵥᵢᵢ | E₅ | Eₑ |
| 4175 | E₁ₐE₂E₃EᵢᵥE₄ | AlkLEᵥᵢᵢ | E₅ | Eₑ |
| 4176 | E_{1b}E₂E₃EᵢᵥE₄ | AlkLEᵥᵢᵢ | E₅ | Eₑ |
| 4177 | E₁ₐE₂ | AlkLEᵥᵢᵢ | E₄*E₅ | Eₑ |
| 4178 | E_{1b}E₂ | AlkLEᵥᵢᵢ | E₄*E₅ | Eₑ |
| 4179 | E₁ₐE₂E₃ | AlkLEᵥᵢᵢ | E₄*E₅ | Eₑ |
| 4180 | E_{1b}E₂E₃ | AlkLEᵥᵢᵢ | E₄*E₅ | Eₑ |
| 4181 | E₁ₐE₂Eᵢ | AlkLEᵥᵢᵢ | E₄*E₅ | Eₑ |
| 4182 | E_{1b}E₂Eᵢ | AlkLEᵥᵢᵢ | E₄*E₅ | Eₑ |
| 4183 | E₁ₐE₂Eᵢᵢ | AlkLEᵥᵢᵢ | E₄*E₅ | Eₑ |
| 4184 | E_{1b}E₂Eᵢᵢ | AlkLEᵥᵢᵢ | E₄*E₅ | Eₑ |
| 4185 | E₁ₐE₂EᵢᵢE_{iib} | AlkLEᵥᵢᵢ | E₄*E₅ | Eₑ |
| 4186 | E_{1b}E₂EᵢᵢE_{iib} | AlkLEᵥᵢᵢ | E₄*E₅ | Eₑ |
| 4187 | E₁ₐE₂E₃Eᵢ | AlkLEᵥᵢᵢ | E₄*E₅ | Eₑ |
| 4188 | E_{1b}E₂E₃Eᵢ | AlkLEᵥᵢᵢ | E₄*E₅ | Eₑ |
| 4189 | E₁ₐE₂E₃Eᵢᵢ | AlkLEᵥᵢᵢ | E₄*E₅ | Eₑ |
| 4190 | E_{1b}E₂E₃Eᵢᵢ | AlkLEᵥᵢᵢ | E₄*E₅ | Eₑ |
| 4191 | E₁ₐE₂E₃EᵢᵢE_{iib} | AlkLEᵥᵢᵢ | E₄*E₅ | Eₑ |
| 4192 | E_{1b}E₂E₃EᵢᵢE_{iib} | AlkLEᵥᵢᵢ | E₄*E₅ | Eₑ |
| 4193 | E₁ₐE₂E₄ | AlkLEᵥᵢᵢ | E₄*E₅ | Eₑ |
| 4194 | E_{1b}E₂E₄ | AlkLEᵥᵢᵢ | E₄*E₅ | Eₑ |
| 4195 | E₁ₐE₂E₃E₄ | AlkLEᵥᵢᵢ | E₄*E₅ | Eₑ |
| 4196 | E_{1b}E₂E₃E₄ | AlkLEᵥᵢᵢ | E₄*E₅ | Eₑ |
| 4197 | E₁ₐE₂EᵢE₄ | AlkLEᵥᵢᵢ | E₄*E₅ | Eₑ |
| 4198 | E_{1b}E₂EᵢE₄ | AlkLEᵥᵢᵢ | E₄*E₅ | Eₑ |
| 4199 | E₁ₐE₂EᵢᵢE₄ | AlkLEᵥᵢᵢ | E₄*E₅ | Eₑ |
| 4200 | E_{1b}E₂EᵢᵢE₄ | AlkLEᵥᵢᵢ | E₄*E₅ | Eₑ |
| 4201 | E₁ₐE₂EᵢᵢE_{iib}E₄ | AlkLEᵥᵢᵢ | E₄*E₅ | Eₑ |
| 4202 | E_{1b}E₂EᵢᵢE_{iib}E₄ | AlkLEᵥᵢᵢ | E₄*E₅ | Eₑ |
| 4203 | E₁ₐE₂E₃EᵢE₄ | AlkLEᵥᵢᵢ | E₄*E₅ | Eₑ |
| 4204 | E_{1b}E₂E₃EᵢE₄ | AlkLEᵥᵢᵢ | E₄*E₅ | Eₑ |
| 4205 | E₁ₐE₂E₃EᵢᵢE₄ | AlkLEᵥᵢᵢ | E₄*E₅ | Eₑ |
| 4206 | E_{1b}E₂E₃EᵢᵢE₄ | AlkLEᵥᵢᵢ | E₄*E₅ | Eₑ |
| 4207 | E₁ₐE₂E₃EᵢᵢE_{iib}E₄ | AlkLEᵥᵢᵢ | E₄*E₅ | Eₑ |
| 4208 | E_{1b}E₂E₃EᵢᵢE_{iib}E₄ | AlkLEᵥᵢᵢ | E₄*E₅ | Eₑ |
| 4209 | E₁ₐE₂Eᵢᵢᵢ | AlkLEᵥᵢᵢ | E₄*E₅ | Eₑ |
| 4210 | E_{1b}E₂Eᵢᵢᵢ | AlkLEᵥᵢᵢ | E₄*E₅ | Eₑ |
| 4211 | E₁ₐE₂E₃Eᵢᵢᵢ | AlkLEᵥᵢᵢ | E₄*E₅ | Eₑ |
| 4212 | E_{1b}E₂E₃Eᵢᵢᵢ | AlkLEᵥᵢᵢ | E₄*E₅ | Eₑ |
| 4213 | E₁ₐE₂EᵢᵢᵢE₄ | AlkLEᵥᵢᵢ | E₄*E₅ | Eₑ |
| 4214 | E_{1b}E₂EᵢᵢᵢE₄ | AlkLEᵥᵢᵢ | E₄*E₅ | Eₑ |
| 4215 | E₁ₐE₂E₃EᵢᵢᵢE₄ | AlkLEᵥᵢᵢ | E₄*E₅ | Eₑ |
| 4216 | E_{1b}E₂E₃EᵢᵢᵢE₄ | AlkLEᵥᵢᵢ | E₄*E₅ | Eₑ |
| 4217 | E₁ₐE₂Eᵢᵥ | AlkLEᵥᵢᵢ | E₄*E₅ | Eₑ |
| 4218 | E_{1b}E₂Eᵢᵥ | AlkLEᵥᵢᵢ | E₄*E₅ | Eₑ |
| 4219 | E₁ₐE₂E₃Eᵢᵥ | AlkLEᵥᵢᵢ | E₄*E₅ | Eₑ |
| 4220 | E_{1b}E₂E₃Eᵢᵥ | AlkLEᵥᵢᵢ | E₄*E₅ | Eₑ |
| 4221 | E₁ₐE₂EᵢᵥE₄ | AlkLEᵥᵢᵢ | E₄*E₅ | Eₑ |
| 4222 | E_{1b}E₂EᵢᵥE₄ | AlkLEᵥᵢᵢ | E₄*E₅ | Eₑ |
| 4223 | E₁ₐE₂E₃EᵢᵥE₄ | AlkLEᵥᵢᵢ | E₄*E₅ | Eₑ |
| 4224 | E_{1b}E₂E₃EᵢᵥE₄ | AlkLEᵥᵢᵢ | E₄*E₅ | Eₑ |
| 4225 | E₁ₐE₂ | Eᵥᵢᵢ | | E_{f} |
| 4226 | E_{1b}E₂ | Eᵥᵢᵢ | | E_{f} |
| 4227 | E₁ₐE₂E₃ | Eᵥᵢᵢ | | E_{f} |
| 4228 | E_{1b}E₂E₃ | Eᵥᵢᵢ | | E_{f} |
| 4229 | E₁ₐE₂Eᵢ | Eᵥᵢᵢ | | E_{f} |
| 4230 | E_{1b}E₂Eᵢ | Eᵥᵢᵢ | | E_{f} |
| 4231 | E₁ₐE₂Eᵢᵢ | Eᵥᵢᵢ | | E_{f} |
| 4232 | E_{1b}E₂Eᵢᵢ | Eᵥᵢᵢ | | E_{f} |
| 4233 | E₁ₐE₂EᵢᵢE_{iib} | Eᵥᵢᵢ | | E_{f} |
| 4234 | E_{1b}E₂EᵢᵢE_{iib} | Eᵥᵢᵢ | | E_{f} |
| 4235 | E₁ₐE₂E₃Eᵢ | Eᵥᵢᵢ | | E_{f} |
| 4236 | E_{1b}E₂E₃Eᵢ | Eᵥᵢᵢ | | E_{f} |
| 4237 | E₁ₐE₂E₃Eᵢᵢ | Eᵥᵢᵢ | | E_{f} |
| 4238 | E_{1b}E₂E₃Eᵢᵢ | Eᵥᵢᵢ | | E_{f} |
| 4239 | E₁ₐE₂E₃EᵢᵢE_{iib} | Eᵥᵢᵢ | | E_{f} |
| 4240 | E_{1b}E₂E₃EᵢᵢE_{iib} | Eᵥᵢᵢ | | E_{f} |
| 4241 | E₁ₐE₂E₄ | Eᵥᵢᵢ | | E_{f} |
| 4242 | E_{1b}E₂E₄ | Eᵥᵢᵢ | | E_{f} |
| 4243 | E₁ₐE₂E₃E₄ | Eᵥᵢᵢ | | E_{f} |
| 4244 | E_{1b}E₂E₃E₄ | Eᵥᵢᵢ | | E_{f} |
| 4245 | E₁ₐE₂EᵢE₄ | Eᵥᵢᵢ | | E_{f} |
| 4246 | E_{1b}E₂EᵢE₄ | Eᵥᵢᵢ | | E_{f} |
| 4247 | E₁ₐE₂EᵢᵢE₄ | Eᵥᵢᵢ | | E_{f} |
| 4248 | E_{1b}E₂EᵢᵢE₄ | Eᵥᵢᵢ | | E_{f} |
| 4249 | E₁ₐE₂EᵢᵢE_{iib}E₄ | Eᵥᵢᵢ | | E_{f} |
| 4250 | E_{1b}E₂EᵢᵢE_{iib}E₄ | Eᵥᵢᵢ | | E_{f} |
| 4251 | E₁ₐE₂E₃EᵢE₄ | Eᵥᵢᵢ | | E_{f} |
| 4252 | E_{1b}E₂E₃EᵢE₄ | Eᵥᵢᵢ | | E_{f} |
| 4253 | E₁ₐE₂E₃EᵢᵢE₄ | Eᵥᵢᵢ | | E_{f} |
| 4254 | E_{1b}E₂E₃EᵢᵢE₄ | Eᵥᵢᵢ | | E_{f} |
| 4255 | E₁ₐE₂E₃EᵢᵢE_{iib}E₄ | Eᵥᵢᵢ | | E_{f} |
| 4256 | E_{1b}E₂E₃EᵢᵢE_{iib}E₄ | Eᵥᵢᵢ | | E_{f} |
| 4257 | E₁ₐE₂Eᵢᵢᵢ | Eᵥᵢᵢ | | E_{f} |
| 4258 | E_{1b}E₂Eᵢᵢᵢ | Eᵥᵢᵢ | | E_{f} |
| 4259 | E₁ₐE₂E₃Eᵢᵢᵢ | Eᵥᵢᵢ | | E_{f} |
| 4260 | E_{1b}E₂E₃Eᵢᵢᵢ | Eᵥᵢᵢ | | E_{f} |
| 4261 | E₁ₐE₂EᵢᵢᵢE₄ | Eᵥᵢᵢ | | E_{f} |
| 4262 | E_{1b}E₂EᵢᵢᵢE₄ | Eᵥᵢᵢ | | E_{f} |
| 4263 | E₁ₐE₂E₃EᵢᵢᵢE₄ | Eᵥᵢᵢ | | E_{f} |
| 4264 | E_{1b}E₂E₃EᵢᵢᵢE₄ | Eᵥᵢᵢ | | E_{f} |
| 4265 | E₁ₐE₂Eᵢᵥ | Eᵥᵢᵢ | | E_{f} |
| 4266 | E_{1b}E₂Eᵢᵥ | Eᵥᵢᵢ | | E_{f} |
| 4267 | E₁ₐE₂E₃Eᵢᵥ | Eᵥᵢᵢ | | E_{f} |
| 4268 | E_{1b}E₂E₃Eᵢᵥ | Eᵥᵢᵢ | | E_{f} |
| 4269 | E₁ₐE₂EᵢᵥE₄ | Eᵥᵢᵢ | | E_{f} |
| 4270 | E_{1b}E₂EᵢᵥE₄ | Eᵥᵢᵢ | | E_{f} |
| 4271 | E₁ₐE₂E₃EᵢᵥE₄ | Eᵥᵢᵢ | | E_{f} |
| 4272 | E_{1b}E₂E₃EᵢᵥE₄ | Eᵥᵢᵢ | | E_{f} |
| 4273 | E₁ₐE₂ | Eᵥᵢᵢ | E₄* | E_{f} |
| 4274 | E_{1b}E₂ | Eᵥᵢᵢ | E₄* | E_{f} |
| 4275 | E₁ₐE₂E₃ | Eᵥᵢᵢ | E₄* | E_{f} |
| 4276 | E_{1b}E₂E₃ | Eᵥᵢᵢ | E₄* | E_{f} |
| 4277 | E₁ₐE₂Eᵢ | Eᵥᵢᵢ | E₄* | E_{f} |
| 4278 | E_{1b}E₂Eᵢ | Eᵥᵢᵢ | E₄* | E_{f} |
| 4279 | E₁ₐE₂Eᵢᵢ | Eᵥᵢᵢ | E₄* | E_{f} |
| 4280 | E_{1b}E₂Eᵢᵢ | Eᵥᵢᵢ | E₄* | E_{f} |
| 4281 | E₁ₐE₂EᵢᵢE_{iib} | Eᵥᵢᵢ | E₄* | E_{f} |
| 4282 | E_{1b}E₂EᵢᵢE_{iib} | Eᵥᵢᵢ | E₄* | E_{f} |
| 4283 | E₁ₐE₂E₃Eᵢ | Eᵥᵢᵢ | E₄* | E_{f} |
| 4284 | E_{1b}E₂E₃Eᵢ | Eᵥᵢᵢ | E₄* | E_{f} |
| 4285 | E₁ₐE₂E₃Eᵢᵢ | Eᵥᵢᵢ | E₄* | E_{f} |
| 4286 | E_{1b}E₂E₃Eᵢᵢ | Eᵥᵢᵢ | E₄* | E_{f} |
| 4287 | E₁ₐE₂E₃EᵢᵢE_{iib} | Eᵥᵢᵢ | E₄* | E_{f} |
| 4288 | E_{1b}E₂E₃EᵢᵢE_{iib} | Eᵥᵢᵢ | E₄* | E_{f} |
| 4289 | E₁ₐE₂E₄ | Eᵥᵢᵢ | E₄* | E_{f} |
| 4290 | E_{1b}E₂E₄ | Eᵥᵢᵢ | E₄* | E_{f} |
| 4291 | E₁ₐE₂E₃E₄ | Eᵥᵢᵢ | E₄* | E_{f} |
| 4292 | E_{1b}E₂E₃E₄ | Eᵥᵢᵢ | E₄* | E_{f} |
| 4293 | E₁ₐE₂EᵢE₄ | Eᵥᵢᵢ | E₄* | E_{f} |
| 4294 | E_{1b}E₂EᵢE₄ | Eᵥᵢᵢ | E₄* | E_{f} |
| 4295 | E₁ₐE₂EᵢᵢE₄ | Eᵥᵢᵢ | E₄* | E_{f} |
| 4296 | E_{1b}E₂EᵢᵢE₄ | Eᵥᵢᵢ | E₄* | E_{f} |
| 4297 | E₁ₐE₂EᵢᵢE_{iib}E₄ | Eᵥᵢᵢ | E₄* | E_{f} |
| 4298 | E_{1b}E₂EᵢᵢE_{iib}E₄ | Eᵥᵢᵢ | E₄* | E_{f} |
| 4299 | E₁ₐE₂E₃EᵢE₄ | Eᵥᵢᵢ | E₄* | E_{f} |
| 4300 | E_{1b}E₂E₃EᵢE₄ | Eᵥᵢᵢ | E₄* | E_{f} |
| 4301 | E₁ₐE₂E₃EᵢᵢE₄ | Eᵥᵢᵢ | E₄* | E_{f} |
| 4302 | E_{1b}E₂E₃EᵢᵢE₄ | Eᵥᵢᵢ | E₄* | E_{f} |
| 4303 | E₁ₐE₂E₃EᵢᵢE_{iib}E₄ | Eᵥᵢᵢ | E₄* | E_{f} |
| 4304 | E_{1b}E₂E₃EᵢᵢE_{iib}E₄ | Eᵥᵢᵢ | E₄* | E_{f} |
| 4305 | E₁ₐE₂Eᵢᵢᵢ | Eᵥᵢᵢ | E₄* | E_{f} |
| 4306 | E_{1b}E₂Eᵢᵢᵢ | Eᵥᵢᵢ | E₄* | E_{f} |
| 4307 | E₁ₐE₂E₃Eᵢᵢᵢ | Eᵥᵢᵢ | E₄* | E_{f} |
| 4308 | E_{1b}E₂E₃Eᵢᵢᵢ | Eᵥᵢᵢ | E₄* | E_{f} |
| 4309 | E₁ₐE₂EᵢᵢᵢE₄ | Eᵥᵢᵢ | E₄* | E_{f} |
| 4310 | E_{1b}E₂EᵢᵢᵢE₄ | Eᵥᵢᵢ | E₄* | E_{f} |
| 4311 | E₁ₐE₂E₃EᵢᵢᵢE₄ | Eᵥᵢᵢ | E₄* | E_{f} |
| 4312 | E_{1b}E₂E₃EᵢᵢᵢE₄ | Eᵥᵢᵢ | E₄* | E_{f} |
| 4313 | E₁ₐE₂Eᵢᵥ | Eᵥᵢᵢ | E₄* | E_{f} |
| 4314 | E_{1b}E₂Eᵢᵥ | Eᵥᵢᵢ | E₄* | E_{f} |
| 4315 | E₁ₐE₂E₃Eᵢᵥ | Eᵥᵢᵢ | E₄* | E_{f} |
| 4316 | E_{1b}E₂E₃Eᵢᵥ | Eᵥᵢᵢ | E₄* | E_{f} |
| 4317 | E₁ₐE₂EᵢᵥE₄ | Eᵥᵢᵢ | E₄* | E_{f} |
| 4318 | E_{1b}E₂EᵢᵥE₄ | Eᵥᵢᵢ | E₄* | E_{f} |
| 4319 | E₁ₐE₂E₃EᵢᵥE₄ | Eᵥᵢᵢ | E₄* | E_{f} |
| 4320 | E_{1b}E₂E₃EᵢᵥE₄ | Eᵥᵢᵢ | E₄* | E_{f} |
| 4321 | E₁ₐE₂ | Eᵥᵢᵢ | E₅ | E_{f} |
| 4322 | E_{1b}E₂ | Eᵥᵢᵢ | E₅ | E_{f} |
| 4323 | E₁ₐE₂E₃ | Eᵥᵢᵢ | E₅ | E_{f} |
| 4324 | E_{1b}E₂E₃ | Eᵥᵢᵢ | E₅ | E_{f} |
| 4325 | E₁ₐE₂Eᵢ | Eᵥᵢᵢ | E₅ | E_{f} |
| 4326 | E_{1b}E₂Eᵢ | Eᵥᵢᵢ | E₅ | E_{f} |
| 4327 | E₁ₐE₂Eᵢᵢ | Eᵥᵢᵢ | E₅ | E_{f} |
| 4328 | E_{1b}E₂Eᵢᵢ | Eᵥᵢᵢ | E₅ | E_{f} |
| 4329 | E₁ₐE₂EᵢᵢE_{iib} | Eᵥᵢᵢ | E₅ | E_{f} |
| 4330 | E_{1b}E₂EᵢᵢE_{iib} | Eᵥᵢᵢ | E₅ | E_{f} |
| 4331 | E₁ₐE₂E₃Eᵢ | Eᵥᵢᵢ | E₅ | E_{f} |
| 4332 | E_{1b}E₂E₃Eᵢ | Eᵥᵢᵢ | E₅ | E_{f} |
| 4333 | E₁ₐE₂E₃Eᵢᵢ | Eᵥᵢᵢ | E₅ | E_{f} |
| 4334 | E_{1b}E₂E₃Eᵢᵢ | Eᵥᵢᵢ | E₅ | E_{f} |
| 4335 | E₁ₐE₂E₃EᵢᵢE_{iib} | Eᵥᵢᵢ | E₅ | E_{f} |
| 4336 | E_{1b}E₂E₃EᵢᵢE_{iib} | Eᵥᵢᵢ | E₅ | E_{f} |
| 4337 | E₁ₐE₂E₄ | Eᵥᵢᵢ | E₅ | E_{f} |
| 4338 | E_{1b}E₂E₄ | Eᵥᵢᵢ | E₅ | E_{f} |
| 4339 | E₁ₐE₂E₃E₄ | Eᵥᵢᵢ | E₅ | E_{f} |
| 4340 | E_{1b}E₂E₃E₄ | Eᵥᵢᵢ | E₅ | E_{f} |
| 4341 | E₁ₐE₂EᵢE₄ | Eᵥᵢᵢ | E₅ | E_{f} |
| 4342 | E_{1b}E₂EᵢE₄ | Eᵥᵢᵢ | E₅ | E_{f} |
| 4343 | E₁ₐE₂EᵢᵢE₄ | Eᵥᵢᵢ | E₅ | E_{f} |
| 4344 | E_{1b}E₂EᵢᵢE₄ | Eᵥᵢᵢ | E₅ | E_{f} |
| 4345 | E₁ₐE₂EᵢᵢE_{iib}E₄ | Eᵥᵢᵢ | E₅ | E_{f} |
| 4346 | E_{1b}E₂EᵢᵢE_{iib}E₄ | Eᵥᵢᵢ | E₅ | E_{f} |
| 4347 | E₁ₐE₂E₃EᵢE₄ | Eᵥᵢᵢ | E₅ | E_{f} |
| 4348 | E_{1b}E₂E₃EᵢE₄ | Eᵥᵢᵢ | E₅ | E_{f} |
| 4349 | E₁ₐE₂E₃EᵢᵢE₄ | Eᵥᵢᵢ | E₅ | E_{f} |
| 4350 | E_{1b}E₂E₃EᵢᵢE₄ | Eᵥᵢᵢ | E₅ | E_{f} |
| 4351 | E₁ₐE₂E₃EᵢᵢE_{iib}E₄ | Eᵥᵢᵢ | E₅ | E_{f} |
| 4352 | E_{1b}E₂E₃EᵢᵢE_{iib}E₄ | Eᵥᵢᵢ | E₅ | E_{f} |
| 4353 | E₁ₐE₂Eᵢᵢᵢ | Eᵥᵢᵢ | E₅ | E_{f} |
| 4354 | E_{1b}E₂Eᵢᵢᵢ | Eᵥᵢᵢ | E₅ | E_{f} |
| 4355 | E₁ₐE₂E₃Eᵢᵢᵢ | Eᵥᵢᵢ | E₅ | E_{f} |
| 4356 | E_{1b}E₂E₃Eᵢᵢᵢ | Eᵥᵢᵢ | E₅ | E_{f} |
| 4357 | E₁ₐE₂EᵢᵢᵢE₄ | Eᵥᵢᵢ | E₅ | E_{f} |
| 4358 | E_{1b}E₂EᵢᵢᵢE₄ | Eᵥᵢᵢ | E₅ | E_{f} |
| 4359 | E₁ₐE₂E₃EᵢᵢᵢE₄ | Eᵥᵢᵢ | E₅ | E_{f} |
| 4360 | E_{1b}E₂E₃EᵢᵢᵢE₄ | Eᵥᵢᵢ | E₅ | E_{f} |
| 4361 | E₁ₐE₂Eᵢᵥ | Eᵥᵢᵢ | E₅ | E_{f} |
| 4362 | E_{1b}E₂Eᵢᵥ | Eᵥᵢᵢ | E₅ | E_{f} |
| 4363 | E₁ₐE₂E₃Eᵢᵥ | Eᵥᵢᵢ | E₅ | E_{f} |
| 4364 | E_{1b}E₂E₃Eᵢᵥ | Eᵥᵢᵢ | E₅ | E_{f} |
| 4365 | E₁ₐE₂EᵢᵥE₄ | Eᵥᵢᵢ | E₅ | E_{f} |
| 4366 | E_{1b}E₂EᵢᵥE₄ | Eᵥᵢᵢ | E₅ | E_{f} |
| 4367 | E₁ₐE₂E₃EᵢᵥE₄ | Eᵥᵢᵢ | E₅ | E_{f} |
| 4368 | E_{1b}E₂E₃EᵢᵥE₄ | Eᵥᵢᵢ | E₅ | E_{f} |
| 4369 | E₁ₐE₂ | Eᵥᵢᵢ | E₄*E₅ | E_{f} |
| 4370 | E_{1b}E₂ | Eᵥᵢᵢ | E₄*E₅ | E_{f} |
| 4371 | E₁ₐE₂E₃ | Eᵥᵢᵢ | E₄*E₅ | E_{f} |
| 4372 | E_{1b}E₂E₃ | Eᵥᵢᵢ | E₄*E₅ | E_{f} |
| 4373 | E₁ₐE₂Eᵢ | Eᵥᵢᵢ | E₄*E₅ | E_{f} |
| 4374 | E_{1b}E₂Eᵢ | Eᵥᵢᵢ | E₄*E₅ | E_{f} |
| 4375 | E₁ₐE₂Eᵢᵢ | Eᵥᵢᵢ | E₄*E₅ | E_{f} |
| 4376 | E_{1b}E₂Eᵢᵢ | Eᵥᵢᵢ | E₄*E₅ | E_{f} |
| 4377 | E₁ₐE₂EᵢᵢE_{iib} | Eᵥᵢᵢ | E₄*E₅ | E_{f} |
| 4378 | E_{1b}E₂EᵢᵢE_{iib} | Eᵥᵢᵢ | E₄*E₅ | E_{f} |
| 4379 | E₁ₐE₂E₃Eᵢ | Eᵥᵢᵢ | E₄*E₅ | E_{f} |
| 4380 | E_{1b}E₂E₃Eᵢ | Eᵥᵢᵢ | E₄*E₅ | E_{f} |
| 4381 | E₁ₐE₂E₃Eᵢᵢ | Eᵥᵢᵢ | E₄*E₅ | E_{f} |
| 4382 | E_{1b}E₂E₃Eᵢᵢ | Eᵥᵢᵢ | E₄*E₅ | E_{f} |
| 4383 | E₁ₐE₂E₃EᵢᵢE_{iib} | Eᵥᵢᵢ | E₄*E₅ | E_{f} |
| 4384 | E_{1b}E₂E₃EᵢᵢE_{iib} | Eᵥᵢᵢ | E₄*E₅ | E_{f} |
| 4385 | E₁ₐE₂E₄ | Eᵥᵢᵢ | E₄*E₅ | E_{f} |
| 4386 | E_{1b}E₂E₄ | Eᵥᵢᵢ | E₄*E₅ | E_{f} |
| 4387 | E₁ₐE₂E₃E₄ | Eᵥᵢᵢ | E₄*E₅ | E_{f} |
| 4388 | E_{1b}E₂E₃E₄ | Eᵥᵢᵢ | E₄*E₅ | E_{f} |
| 4389 | E₁ₐE₂EᵢE₄ | Eᵥᵢᵢ | E₄*E₅ | E_{f} |
| 4390 | E_{1b}E₂EᵢE₄ | Eᵥᵢᵢ | E₄*E₅ | E_{f} |
| 4391 | E₁ₐE₂EᵢᵢE₄ | Eᵥᵢᵢ | E₄*E₅ | E_{f} |
| 4392 | E_{1b}E₂EᵢᵢE₄ | Eᵥᵢᵢ | E₄*E₅ | E_{f} |
| 4393 | E₁ₐE₂EᵢᵢE_{iib}E₄ | Eᵥᵢᵢ | E₄*E₅ | E_{f} |
| 4394 | E_{1b}E₂EᵢᵢE_{iib}E₄ | Eᵥᵢᵢ | E₄*E₅ | E_{f} |
| 4395 | E₁ₐE₂E₃EᵢE₄ | Eᵥᵢᵢ | E₄*E₅ | E_{f} |
| 4396 | E_{1b}E₂E₃EᵢE₄ | Eᵥᵢᵢ | E₄*E₅ | E_{f} |
| 4397 | E₁ₐE₂E₃EᵢᵢE₄ | Eᵥᵢᵢ | E₄*E₅ | E_{f} |
| 4398 | E_{1b}E₂E₃EᵢᵢE₄ | Eᵥᵢᵢ | E₄*E₅ | E_{f} |
| 4399 | E₁ₐE₂E₃EᵢᵢE_{iib}E₄ | Eᵥᵢᵢ | E₄*E₅ | E_{f} |
| 4400 | E_{1b}E₂E₃EᵢᵢE_{iib}E₄ | Eᵥᵢᵢ | E₄*E₅ | E_{f} |
| 4401 | E₁ₐE₂Eᵢᵢᵢ | Eᵥᵢᵢ | E₄*E₅ | E_{f} |
| 4402 | E_{1b}E₂Eᵢᵢᵢ | Eᵥᵢᵢ | E₄*E₅ | E_{f} |
| 4403 | E₁ₐE₂E₃Eᵢᵢᵢ | Eᵥᵢᵢ | E₄*E₅ | E_{f} |
| 4404 | E_{1b}E₂E₃Eᵢᵢᵢ | Eᵥᵢᵢ | E₄*E₅ | E_{f} |
| 4405 | E₁ₐE₂EᵢᵢᵢE₄ | Eᵥᵢᵢ | E₄*E₅ | E_{f} |
| 4406 | E_{1b}E₂EᵢᵢᵢE₄ | Eᵥᵢᵢ | E₄*E₅ | E_{f} |
| 4407 | E₁ₐE₂E₃EᵢᵢᵢE₄ | Eᵥᵢᵢ | E₄*E₅ | E_{f} |
| 4408 | E_{1b}E₂E₃EᵢᵢᵢE₄ | Eᵥᵢᵢ | E₄*E₅ | E_{f} |
| 4409 | E₁ₐE₂Eᵢᵥ | Eᵥᵢᵢ | E₄*E₅ | E_{f} |
| 4410 | E_{1b}E₂Eᵢᵥ | Eᵥᵢᵢ | E₄*E₅ | E_{f} |
| 4411 | E₁ₐE₂E₃Eᵢᵥ | Eᵥᵢᵢ | E₄*E₅ | E_{f} |
| 4412 | E_{1b}E₂E₃Eᵢᵥ | Eᵥᵢᵢ | E₄*E₅ | E_{f} |
| 4413 | E₁ₐE₂EᵢᵥE₄ | Eᵥᵢᵢ | E₄*E₅ | E_{f} |
| 4414 | E_{1b}E₂EᵢᵥE₄ | Eᵥᵢᵢ | E₄*E₅ | E_{f} |
| 4415 | E₁ₐE₂E₃EᵢᵥE₄ | Eᵥᵢᵢ | E₄*E₅ | E_{f} |
| 4416 | E_{1b}E₂E₃EᵢᵥE₄ | Eᵥᵢᵢ | E₄*E₅ | E_{f} |
| 4417 | E₁ₐE₂ | AlkLEᵥᵢᵢ | | E_{f} |
| 4418 | E_{1b}E₂ | AlkLEᵥᵢᵢ | | E_{f} |
| 4419 | E₁ₐE₂E₃ | AlkLEᵥᵢᵢ | | E_{f} |
| 4420 | E_{1b}E₂E₃ | AlkLEᵥᵢᵢ | | E_{f} |
| 4421 | E₁ₐE₂Eᵢ | AlkLEᵥᵢᵢ | | E_{f} |
| 4422 | E_{1b}E₂Eᵢ | AlkLEᵥᵢᵢ | | E_{f} |
| 4423 | E₁ₐE₂Eᵢᵢ | AlkLEᵥᵢᵢ | | E_{f} |
| 4424 | E_{1b}E₂Eᵢᵢ | AlkLEᵥᵢᵢ | | E_{f} |
| 4425 | E₁ₐE₂EᵢᵢE_{iib} | AlkLEᵥᵢᵢ | | E_{f} |
| 4426 | E_{1b}E₂EᵢᵢE_{iib} | AlkLEᵥᵢᵢ | | E_{f} |
| 4427 | E₁ₐE₂E₃Eᵢ | AlkLEᵥᵢᵢ | | E_{f} |
| 4428 | E_{1b}E₂E₃Eᵢ | AlkLEᵥᵢᵢ | | E_{f} |
| 4429 | E₁ₐE₂E₃Eᵢᵢ | AlkLEᵥᵢᵢ | | E_{f} |
| 4430 | E_{1b}E₂E₃Eᵢᵢ | AlkLEᵥᵢᵢ | | E_{f} |
| 4431 | E₁ₐE₂E₃EᵢᵢE_{iib} | AlkLEᵥᵢᵢ | | E_{f} |
| 4432 | E_{1b}E₂E₃EᵢᵢE_{iib} | AlkLEᵥᵢᵢ | | E_{f} |
| 4433 | E₁ₐE₂E₄ | AlkLEᵥᵢᵢ | | E_{f} |
| 4434 | E_{1b}E₂E₄ | AlkLEᵥᵢᵢ | | E_{f} |
| 4435 | E₁ₐE₂E₃E₄ | AlkLEᵥᵢᵢ | | E_{f} |
| 4436 | E_{1b}E₂E₃E₄ | AlkLEᵥᵢᵢ | | E_{f} |
| 4437 | E₁ₐE₂EᵢE₄ | AlkLEᵥᵢᵢ | | E_{f} |
| 4438 | E_{1b}E₂EᵢE₄ | AlkLEᵥᵢᵢ | | E_{f} |
| 4439 | E₁ₐE₂EᵢᵢE₄ | AlkLEᵥᵢᵢ | | E_{f} |
| 4440 | E_{1b}E₂EᵢᵢE₄ | AlkLEᵥᵢᵢ | | E_{f} |
| 4441 | E₁ₐE₂EᵢᵢE_{iib}E₄ | AlkLEᵥᵢᵢ | | E_{f} |
| 4442 | E_{1b}E₂EᵢᵢE_{iib}E₄ | AlkLEᵥᵢᵢ | | E_{f} |
| 4443 | E₁ₐE₂E₃EᵢE₄ | AlkLEᵥᵢᵢ | | E_{f} |
| 4444 | E_{1b}E₂E₃EᵢE₄ | AlkLEᵥᵢᵢ | | E_{f} |
| 4445 | E₁ₐE₂E₃EᵢᵢE₄ | AlkLEᵥᵢᵢ | | E_{f} |
| 4446 | E_{1b}E₂E₃EᵢᵢE₄ | AlkLEᵥᵢᵢ | | E_{f} |
| 4447 | E₁ₐE₂E₃EᵢᵢE_{iib}E₄ | AlkLEᵥᵢᵢ | | E_{f} |
| 4448 | E_{1b}E₂E₃EᵢᵢE_{iib}E₄ | AlkLEᵥᵢᵢ | | E_{f} |
| 4449 | E₁ₐE₂Eᵢᵢᵢ | AlkLEᵥᵢᵢ | | E_{f} |
| 4450 | E_{1b}E₂Eᵢᵢᵢ | AlkLEᵥᵢᵢ | | E_{f} |
| 4451 | E₁ₐE₂E₃Eᵢᵢᵢ | AlkLEᵥᵢᵢ | | E_{f} |
| 4452 | E_{1b}E₂E₃Eᵢᵢᵢ | AlkLEᵥᵢᵢ | | E_{f} |
| 4453 | E₁ₐE₂EᵢᵢᵢE₄ | AlkLEᵥᵢᵢ | | E_{f} |
| 4454 | E_{1b}E₂EᵢᵢᵢE₄ | AlkLEᵥᵢᵢ | | E_{f} |
| 4455 | E₁ₐE₂E₃EᵢᵢᵢE₄ | AlkLEᵥᵢᵢ | | E_{f} |
| 4456 | E_{1b}E₂E₃EᵢᵢᵢE₄ | AlkLEᵥᵢᵢ | | E_{f} |
| 4457 | E₁ₐE₂Eᵢᵥ | AlkLEᵥᵢᵢ | | E_{f} |
| 4458 | E_{1b}E₂Eᵢᵥ | AlkLEᵥᵢᵢ | | E_{f} |
| 4459 | E₁ₐE₂E₃Eᵢᵥ | AlkLEᵥᵢᵢ | | E_{f} |
| 4460 | E_{1b}E₂E₃Eᵢᵥ | AlkLEᵥᵢᵢ | | E_{f} |
| 4461 | E₁ₐE₂EᵢᵥE₄ | AlkLEᵥᵢᵢ | | E_{f} |
| 4462 | E_{1b}E₂EᵢᵥE₄ | AlkLEᵥᵢᵢ | | E_{f} |
| 4463 | E₁ₐE₂E₃EᵢᵥE₄ | AlkLEᵥᵢᵢ | | E_{f} |
| 4464 | E_{1b}E₂E₃EᵢᵥE₄ | AlkLEᵥᵢᵢ | | E_{f} |
| 4465 | E₁ₐE₂ | AlkLEᵥᵢᵢ | E₄* | E_{f} |
| 4466 | E_{1b}E₂ | AlkLEᵥᵢᵢ | E₄* | E_{f} |
| 4467 | E₁ₐE₂E₃ | AlkLEᵥᵢᵢ | E₄* | E_{f} |
| 4468 | E_{1b}E₂E₃ | AlkLEᵥᵢᵢ | E₄* | E_{f} |
| 4469 | E₁ₐE₂Eᵢ | AlkLEᵥᵢᵢ | E₄* | E_{f} |
| 4470 | E_{1b}E₂Eᵢ | AlkLEᵥᵢᵢ | E₄* | E_{f} |
| 4471 | E₁ₐE₂Eᵢᵢ | AlkLEᵥᵢᵢ | E₄* | E_{f} |
| 4472 | E_{1b}E₂Eᵢᵢ | AlkLEᵥᵢᵢ | E₄* | E_{f} |
| 4473 | E₁ₐE₂EᵢᵢE_{iib} | AlkLEᵥᵢᵢ | E₄* | E_{f} |
| 4474 | E_{1b}E₂EᵢᵢE_{iib} | AlkLEᵥᵢᵢ | E₄* | E_{f} |
| 4475 | E₁ₐE₂E₃Eᵢ | AlkLEᵥᵢᵢ | E₄* | E_{f} |
| 4476 | E_{1b}E₂E₃Eᵢ | AlkLEᵥᵢᵢ | E₄* | E_{f} |
| 4477 | E₁ₐE₂E₃Eᵢᵢ | AlkLEᵥᵢᵢ | E₄* | E_{f} |
| 4478 | E_{1b}E₂E₃Eᵢᵢ | AlkLEᵥᵢᵢ | E₄* | E_{f} |
| 4479 | E₁ₐE₂E₃EᵢᵢE_{iib} | AlkLEᵥᵢᵢ | E₄* | E_{f} |
| 4480 | E_{1b}E₂E₃EᵢᵢE_{iib} | AlkLEᵥᵢᵢ | E₄* | E_{f} |
| 4481 | E₁ₐE₂E₄ | AlkLEᵥᵢᵢ | E₄* | E_{f} |
| 4482 | E_{1b}E₂E₄ | AlkLEᵥᵢᵢ | E₄* | E_{f} |
| 4483 | E₁ₐE₂E₃E₄ | AlkLEᵥᵢᵢ | E₄* | E_{f} |
| 4484 | E_{1b}E₂E₃E₄ | AlkLEᵥᵢᵢ | E₄* | E_{f} |
| 4485 | E₁ₐE₂EᵢE₄ | AlkLEᵥᵢᵢ | E₄* | E_{f} |
| 4486 | E_{1b}E₂EᵢE₄ | AlkLEᵥᵢᵢ | E₄* | E_{f} |
| 4487 | E₁ₐE₂EᵢᵢE₄ | AlkLEᵥᵢᵢ | E₄* | E_{f} |
| 4488 | E_{1b}E₂EᵢᵢE₄ | AlkLEᵥᵢᵢ | E₄* | E_{f} |
| 4489 | E₁ₐE₂EᵢᵢE_{iib}E₄ | AlkLEᵥᵢᵢ | E₄* | E_{f} |
| 4490 | E_{1b}E₂EᵢᵢE_{iib}E₄ | AlkLEᵥᵢᵢ | E₄* | E_{f} |
| 4491 | E₁ₐE₂E₃EᵢE₄ | AlkLEᵥᵢᵢ | E₄* | E_{f} |
| 4492 | E_{1b}E₂E₃EᵢE₄ | AlkLEᵥᵢᵢ | E₄* | E_{f} |
| 4493 | E₁ₐE₂E₃EᵢᵢE₄ | AlkLEᵥᵢᵢ | E₄* | E_{f} |
| 4494 | E_{1b}E₂E₃EᵢᵢE₄ | AlkLEᵥᵢᵢ | E₄* | E_{f} |
| 4495 | E₁ₐE₂E₃EᵢᵢE_{iib}E₄ | AlkLEᵥᵢᵢ | E₄* | E_{f} |
| 4496 | E_{1b}E₂E₃EᵢᵢE_{iib}E₄ | AlkLEᵥᵢᵢ | E₄* | E_{f} |
| 4497 | E₁ₐE₂Eᵢᵢᵢ | AlkLEᵥᵢᵢ | E₄* | E_{f} |
| 4498 | E_{1b}E₂Eᵢᵢᵢ | AlkLEᵥᵢᵢ | E₄* | E_{f} |
| 4499 | E₁ₐE₂E₃Eᵢᵢᵢ | AlkLEᵥᵢᵢ | E₄* | E_{f} |
| 4500 | E_{1b}E₂E₃Eᵢᵢᵢ | AlkLEᵥᵢᵢ | E₄* | E_{f} |
| 4501 | E₁ₐE₂EᵢᵢᵢE₄ | AlkLEᵥᵢᵢ | E₄* | E_{f} |
| 4502 | E_{1b}E₂EᵢᵢᵢE₄ | AlkLEᵥᵢᵢ | E₄* | E_{f} |
| 4503 | E₁ₐE₂E₃EᵢᵢᵢE₄ | AlkLEᵥᵢᵢ | E₄* | E_{f} |
| 4504 | E_{1b}E₂E₃EᵢᵢᵢE₄ | AlkLEᵥᵢᵢ | E₄* | E_{f} |
| 4505 | E₁ₐE₂Eᵢᵥ | AlkLEᵥᵢᵢ | E₄* | E_{f} |
| 4506 | E_{1b}E₂Eᵢᵥ | AlkLEᵥᵢᵢ | E₄* | E_{f} |
| 4507 | E₁ₐE₂E₃Eᵢᵥ | AlkLEᵥᵢᵢ | E₄* | E_{f} |
| 4508 | E_{1b}E₂E₃Eᵢᵥ | AlkLEᵥᵢᵢ | E₄* | E_{f} |
| 4509 | E₁ₐE₂EᵢᵥE₄ | AlkLEᵥᵢᵢ | E₄* | E_{f} |
| 4510 | E_{1b}E₂EᵢᵥE₄ | AlkLEᵥᵢᵢ | E₄* | E_{f} |
| 4511 | E₁ₐE₂E₃EᵢᵥE₄ | AlkLEᵥᵢᵢ | E₄* | E_{f} |
| 4512 | E_{1b}E₂E₃EᵢᵥE₄ | AlkLEᵥᵢᵢ | E₄* | E_{f} |
| 4513 | E₁ₐE₂ | AlkLEᵥᵢᵢ | E₅ | E_{f} |
| 4514 | E_{1b}E₂ | AlkLEᵥᵢᵢ | E₅ | E_{f} |
| 4515 | E₁ₐE₂E₃ | AlkLEᵥᵢᵢ | E₅ | E_{f} |
| 4516 | E_{1b}E₂E₃ | AlkLEᵥᵢᵢ | E₅ | E_{f} |
| 4517 | E₁ₐE₂Eᵢ | AlkLEᵥᵢᵢ | E₅ | E_{f} |
| 4518 | E_{1b}E₂Eᵢ | AlkLEᵥᵢᵢ | E₅ | E_{f} |
| 4519 | E₁ₐE₂Eᵢᵢ | AlkLEᵥᵢᵢ | E₅ | E_{f} |
| 4520 | E_{1b}E₂Eᵢᵢ | AlkLEᵥᵢᵢ | E₅ | E_{f} |
| 4521 | E₁ₐE₂EᵢᵢE_{iib} | AlkLEᵥᵢᵢ | E₅ | E_{f} |
| 4522 | E_{1b}E₂EᵢᵢE_{iib} | AlkLEᵥᵢᵢ | E₅ | E_{f} |
| 4523 | E₁ₐE₂E₃Eᵢ | AlkLEᵥᵢᵢ | E₅ | E_{f} |
| 4524 | E_{1b}E₂E₃Eᵢ | AlkLEᵥᵢᵢ | E₅ | E_{f} |
| 4525 | E₁ₐE₂E₃Eᵢᵢ | AlkLEᵥᵢᵢ | E₅ | E_{f} |
| 4526 | E_{1b}E₂E₃Eᵢᵢ | AlkLEᵥᵢᵢ | E₅ | E_{f} |
| 4527 | E₁ₐE₂E₃EᵢᵢE_{iib} | AlkLEᵥᵢᵢ | E₅ | E_{f} |
| 4528 | E_{1b}E₂E₃EᵢᵢE_{iib} | AlkLEᵥᵢᵢ | E₅ | E_{f} |
| 4529 | E₁ₐE₂E₄ | AlkLEᵥᵢᵢ | E₅ | E_{f} |
| 4530 | E_{1b}E₂E₄ | AlkLEᵥᵢᵢ | E₅ | E_{f} |
| 4531 | E₁ₐE₂E₃E₄ | AlkLEᵥᵢᵢ | E₅ | E_{f} |
| 4532 | E_{1b}E₂E₃E₄ | AlkLEᵥᵢᵢ | E₅ | E_{f} |
| 4533 | E₁ₐE₂EᵢE₄ | AlkLEᵥᵢᵢ | E₅ | E_{f} |
| 4534 | E_{1b}E₂EᵢE₄ | AlkLEᵥᵢᵢ | E₅ | E_{f} |
| 4535 | E₁ₐE₂EᵢᵢE₄ | AlkLEᵥᵢᵢ | E₅ | E_{f} |
| 4536 | E_{1b}E₂EᵢᵢE₄ | AlkLEᵥᵢᵢ | E₅ | E_{f} |
| 4537 | E₁ₐE₂EᵢᵢE_{iib}E₄ | AlkLEᵥᵢᵢ | E₅ | E_{f} |
| 4538 | E_{1b}E₂EᵢᵢE_{iib}E₄ | AlkLEᵥᵢᵢ | E₅ | E_{f} |
| 4539 | E₁ₐE₂E₃EᵢE₄ | AlkLEᵥᵢᵢ | E₅ | E_{f} |
| 4540 | E_{1b}E₂E₃EᵢE₄ | AlkLEᵥᵢᵢ | E₅ | E_{f} |
| 4541 | E₁ₐE₂E₃EᵢᵢE₄ | AlkLEᵥᵢᵢ | E₅ | E_{f} |
| 4542 | E_{1b}E₂E₃EᵢᵢE₄ | AlkLEᵥᵢᵢ | E₅ | E_{f} |
| 4543 | E₁ₐE₂E₃EᵢᵢE_{iib}E₄ | AlkLEᵥᵢᵢ | E₅ | E_{f} |
| 4544 | E_{1b}E₂E₃EᵢᵢE_{iib}E₄ | AlkLEᵥᵢᵢ | E₅ | E_{f} |
| 4545 | E₁ₐE₂Eᵢᵢᵢ | AlkLEᵥᵢᵢ | E₅ | E_{f} |
| 4546 | E_{1b}E₂Eᵢᵢᵢ | AlkLEᵥᵢᵢ | E₅ | E_{f} |
| 4547 | E₁ₐE₂E₃Eᵢᵢᵢ | AlkLEᵥᵢᵢ | E₅ | E_{f} |
| 4548 | E_{1b}E₂E₃Eᵢᵢᵢ | AlkLEᵥᵢᵢ | E₅ | E_{f} |
| 4549 | E₁ₐE₂EᵢᵢᵢE₄ | AlkLEᵥᵢᵢ | E₅ | E_{f} |
| 4550 | E_{1b}E₂EᵢᵢᵢE₄ | AlkLEᵥᵢᵢ | E₅ | E_{f} |
| 4551 | E₁ₐE₂E₃EᵢᵢᵢE₄ | AlkLEᵥᵢᵢ | E₅ | E_{f} |
| 4552 | E_{1b}E₂E₃EᵢᵢᵢE₄ | AlkLEᵥᵢᵢ | E₅ | E_{f} |
| 4553 | E₁ₐE₂Eᵢᵥ | AlkLEᵥᵢᵢ | E₅ | E_{f} |
| 4554 | E_{1b}E₂Eᵢᵥ | AlkLEᵥᵢᵢ | E₅ | E_{f} |
| 4555 | E₁ₐE₂E₃Eᵢᵥ | AlkLEᵥᵢᵢ | E₅ | E_{f} |
| 4556 | E_{1b}E₂E₃Eᵢᵥ | AlkLEᵥᵢᵢ | E₅ | E_{f} |
| 4557 | E₁ₐE₂EᵢᵥE₄ | AlkLEᵥᵢᵢ | E₅ | E_{f} |
| 4558 | E_{1b}E₂EᵢᵥE₄ | AlkLEᵥᵢᵢ | E₅ | E_{f} |
| 4559 | E₁ₐE₂E₃EᵢᵥE₄ | AlkLEᵥᵢᵢ | E₅ | E_{f} |
| 4560 | E_{1b}E₂E₃EᵢᵥE₄ | AlkLEᵥᵢᵢ | E₅ | E_{f} |
| 4561 | E₁ₐE₂ | AlkLEᵥᵢᵢ | E₄*E₅ | E_{f} |
| 4562 | E_{1b}E₂ | AlkLEᵥᵢᵢ | E₄*E₅ | E_{f} |
| 4563 | E₁ₐE₂E₃ | AlkLEᵥᵢᵢ | E₄*E₅ | E_{f} |
| 4564 | E_{1b}E₂E₃ | AlkLEᵥᵢᵢ | E₄*E₅ | E_{f} |
| 4565 | E₁ₐE₂Eᵢ | AlkLEᵥᵢᵢ | E₄*E₅ | E_{f} |
| 4566 | E_{1b}E₂Eᵢ | AlkLEᵥᵢᵢ | E₄*E₅ | E_{f} |
| 4567 | E₁ₐE₂Eᵢᵢ | AlkLEᵥᵢᵢ | E₄*E₅ | E_{f} |
| 4568 | E_{1b}E₂Eᵢᵢ | AlkLEᵥᵢᵢ | E₄*E₅ | E_{f} |
| 4569 | E₁ₐE₂EᵢᵢE_{iib} | AlkLEᵥᵢᵢ | E₄*E₅ | E_{f} |
| 4570 | E_{1b}E₂EᵢᵢE_{iib} | AlkLEᵥᵢᵢ | E₄*E₅ | E_{f} |
| 4571 | E₁ₐE₂E₃Eᵢ | AlkLEᵥᵢᵢ | E₄*E₅ | E_{f} |
| 4572 | E_{1b}E₂E₃Eᵢ | AlkLEᵥᵢᵢ | E₄*E₅ | E_{f} |
| 4573 | E₁ₐE₂E₃Eᵢᵢ | AlkLEᵥᵢᵢ | E₄*E₅ | E_{f} |
| 4574 | E_{1b}E₂E₃Eᵢᵢ | AlkLEᵥᵢᵢ | E₄*E₅ | E_{f} |
| 4575 | E₁ₐE₂E₃EᵢᵢE_{iib} | AlkLEᵥᵢᵢ | E₄*E₅ | E_{f} |
| 4576 | E_{1b}E₂E₃EᵢᵢE_{iib} | AlkLEᵥᵢᵢ | E₄*E₅ | E_{f} |
| 4577 | E₁ₐE₂E₄ | AlkLEᵥᵢᵢ | E₄*E₅ | E_{f} |
| 4578 | E_{1b}E₂E₄ | AlkLEᵥᵢᵢ | E₄*E₅ | E_{f} |
| 4579 | E₁ₐE₂E₃E₄ | AlkLEᵥᵢᵢ | E₄*E₅ | E_{f} |
| 4580 | E_{1b}E₂E₃E₄ | AlkLEᵥᵢᵢ | E₄*E₅ | E_{f} |
| 4581 | E₁ₐE₂EᵢE₄ | AlkLEᵥᵢᵢ | E₄*E₅ | E_{f} |
| 4582 | E_{1b}E₂EᵢE₄ | AlkLEᵥᵢᵢ | E₄*E₅ | E_{f} |
| 4583 | E₁ₐE₂EᵢᵢE₄ | AlkLEᵥᵢᵢ | E₄*E₅ | E_{f} |
| 4584 | E_{1b}E₂EᵢᵢE₄ | AlkLEᵥᵢᵢ | E₄*E₅ | E_{f} |
| 4585 | E₁ₐE₂EᵢᵢE_{iib}E₄ | AlkLEᵥᵢᵢ | E₄*E₅ | E_{f} |
| 4586 | E_{1b}E₂EᵢᵢE_{iib}E₄ | AlkLEᵥᵢᵢ | E₄*E₅ | E_{f} |
| 4587 | E₁ₐE₂E₃EᵢE₄ | AlkLEᵥᵢᵢ | E₄*E₅ | E_{f} |
| 4588 | E_{1b}E₂E₃EᵢE₄ | AlkLEᵥᵢᵢ | E₄*E₅ | E_{f} |
| 4589 | E₁ₐE₂E₃EᵢᵢE₄ | AlkLEᵥᵢᵢ | E₄*E₅ | E_{f} |
| 4590 | E_{1b}E₂E₃EᵢᵢE₄ | AlkLEᵥᵢᵢ | E₄*E₅ | E_{f} |
| 4591 | E₁ₐE₂E₃EᵢᵢE_{iib}E₄ | AlkLEᵥᵢᵢ | E₄*E₅ | E_{f} |
| 4592 | E_{1b}E₂E₃EᵢᵢE_{iib}E₄ | AlkLEᵥᵢᵢ | E₄*E₅ | E_{f} |
| 4593 | E₁ₐE₂Eᵢᵢᵢ | AlkLEᵥᵢᵢ | E₄*E₅ | E_{f} |
| 4594 | E_{1b}E₂Eᵢᵢᵢ | AlkLEᵥᵢᵢ | E₄*E₅ | E_{f} |
| 4595 | E₁ₐE₂E₃Eᵢᵢᵢ | AlkLEᵥᵢᵢ | E₄*E₅ | E_{f} |
| 4596 | E_{1b}E₂E₃Eᵢᵢᵢ | AlkLEᵥᵢᵢ | E₄*E₅ | E_{f} |
| 4597 | E₁ₐE₂EᵢᵢᵢE₄ | AlkLEᵥᵢᵢ | E₄*E₅ | E_{f} |
| 4598 | E_{1b}E₂EᵢᵢᵢE₄ | AlkLEᵥᵢᵢ | E₄*E₅ | E_{f} |
| 4599 | E₁ₐE₂E₃EᵢᵢᵢE₄ | AlkLEᵥᵢᵢ | E₄*E₅ | E_{f} |
| 4600 | E_{1b}E₂E₃EᵢᵢᵢE₄ | AlkLEᵥᵢᵢ | E₄*E₅ | E_{f} |
| 4601 | E₁ₐE₂Eᵢᵥ | AlkLEᵥᵢᵢ | E₄*E₅ | E_{f} |
| 4602 | E_{1b}E₂Eᵢᵥ | AlkLEᵥᵢᵢ | E₄*E₅ | E_{f} |
| 4603 | E₁ₐE₂E₃Eᵢᵥ | AlkLEᵥᵢᵢ | E₄*E₅ | E_{f} |
| 4604 | E_{1b}E₂E₃Eᵢᵥ | AlkLEᵥᵢᵢ | E₄*E₅ | E_{f} |
| 4605 | E₁ₐE₂EᵢᵥE₄ | AlkLEᵥᵢᵢ | E₄*E₅ | E_{f} |
| 4606 | E_{1b}E₂EᵢᵥE₄ | AlkLEᵥᵢᵢ | E₄*E₅ | E_{f} |
| 4607 | E₁ₐE₂E₃EᵢᵥE₄ | AlkLEᵥᵢᵢ | E₄*E₅ | E_{f} |
| 4608 | E_{1b}E₂E₃EᵢᵥE₄ | AlkLEᵥᵢᵢ | E₄*E₅ | E_{f} |

[0189] Microorganisms quite especially preferred according to the invention (abbreviated as MO) are outstandingly suitable for the production of ω-hydroxycarboxylic acids or ω-oxocarboxylic acids and have increased or decreased enzyme activities (abbreviated as E) described in the following table, where these can in addition advantageously be combined with an increased enzyme activity compared to the wild type of the microorganism, which is described for the 3-ketoacyl-ACP (Acyl Carrrier Protein) synthase III (EC 2.3.1.41), in particular that from plants, preferably that from plants the seeds whereof contain fatty acids with alkyl residues shorter than 14 C atoms, and particularly preferably that from plants of the genera Cuphea, Elaeis, Cocos, Umbellularia and Cinnamomum and gene products selected from AccA, AccB, AccC, AccD, AceE, AceF, Lpd, AcpP, FabA, FabB, FabD, FabF, FabG, FabH, Fabl, FabZ, PanD, PanK, UdhA, PntA or PntB.

[0190] Any combinations of at least two of these enzyme activities can advantageously be increased.

[0191] In addition, moreover, it can be advantageous if the microorganism is provided with a lower enzyme activity compared to the wild type of the microorganism, which is described for the gene products selected from TdcE, PflA, PflB, PflC, PflD, PoxB, YgfG, AckA, AckB, TdcD, Pta, LdhA, AdhE, MgsA, FdnG, FdnH, FdnI, FdhF, FdoG, FdoH, FdoI, PrpC, PrpD, PrpF, PrpB, TdcD, Pdc, PorA, PorB, PorC, PorD, AlsS, IlvB, IlvM, IlvN, IlvG, IlvI, IlvH, AlsD, ButB, Thl, ThlA, ThlB, PhaA, PhaB, Crt, BdhA, BdhB, Adc, Adh, CtfB, AtoA, AtoD, LdhL, GltA, FabR, FhuA, Dld, LldA or LldP, singly or in any combination.

| | | |
|---|---|---|
| MO | E increased | E decreased |

| | | | | |
|---|---|---|---|---|
| 1 | E₁ₐ | | | |
| 2 | E_{1b} | | | |
| 3 | E₁ₐEᵢ | | | |
| 4 | E_{1b}Eᵢ | | | |
| 5 | E₁ₐEᵢᵢ | | | |
| 6 | E_{1b}Eᵢᵢ | | | |
| 7 | E₁ₐEᵢᵢE_{iib} | | | |
| 8 | E_{1b}EᵢᵢE_{iib} | | | |
| 9 | E₁ₐE₄ | | | |
| 10 | E_{1b}E₄ | | | |
| 11 | E₁ₐEᵢE₄ | | | |
| 12 | E_{1b}EᵢE₄ | | | |
| 13 | E₁ₐEᵢᵢE₄ | | | |
| 14 | E_{1b}EᵢᵢE₄ | | | |
| 15 | E₁ₐEᵢᵢE_{iib}E₄ | | | |
| 16 | E_{1b}EᵢᵢE_{iib}E₄ | | | |
| 17 | E₁ₐEᵢᵢᵢ | | | |
| 18 | E_{1b}Eᵢᵢᵢ | | | |
| 19 | E₁ₐEᵢᵢᵢE₄ | | | |
| 20 | E_{1b}EᵢᵢᵢE₄ | | | |
| 21 | E₁ₐEᵢᵥ | | | |
| 22 | E_{1b}Eᵢᵥ | | | |
| 23 | E₁ₐEᵢᵥE₄ | | | |
| 24 | E_{1b}EᵢᵥE₄ | | | |
| 25 | E₁ₐ | | E₄* | |
| 26 | E_{1b} | | E₄* | |
| 27 | E₁ₐEᵢ | | E₄* | |
| 28 | E_{1b}Eᵢ | | E₄* | |
| 29 | E₁ₐEᵢᵢ | | E₄* | |
| 30 | E_{1b}Eᵢᵢ | | E₄* | |
| 31 | E₁ₐEᵢᵢE_{iib} | | E₄* | |
| 32 | E_{1b}EᵢᵢE_{iib} | | E₄* | |
| 33 | E₁ₐE₄ | | E₄* | |
| 34 | E_{1b}E₄ | | E₄* | |
| 35 | E₁ₐEᵢE₄ | | E₄* | |
| 36 | E_{1b}EᵢE₄ | | E₄* | |
| 37 | E₁ₐEᵢᵢE₄ | | E₄* | |
| 38 | E_{1b}EᵢᵢE₄ | | E₄* | |
| 39 | E₁ₐEᵢᵢE_{iib}E₄ | | E₄* | |
| 40 | E_{1b}EᵢᵢE_{iib}E₄ | | E₄* | |
| 41 | E₁ₐEᵢᵢᵢ | | E₄* | |
| 42 | E_{1b}Eᵢᵢᵢ | | E₄* | |
| 43 | E₁ₐEᵢᵢᵢE₄ | | E₄* | |
| 44 | E_{1b}EᵢᵢᵢE₄ | | E₄* | |
| 45 | E₁ₐEᵢᵥ | | E₄* | |
| 46 | E_{1b}Eᵢᵥ | | E₄* | |
| 47 | E₁ₐEᵢᵥE₄ | | E₄* | |
| 48 | E_{1b}EᵢᵥE₄ | | E₄* | |
| 49 | E₁ₐ | | E₅ | |
| 50 | E_{1b} | | E₅ | |
| 51 | E₁ₐEᵢ | | E₅ | |
| 52 | E_{1b}Eᵢ | | E₅ | |
| 53 | E₁ₐEᵢᵢ | | E₅ | |
| 54 | E_{1b}Eᵢᵢ | | E₅ | |
| 55 | E₁ₐEᵢᵢE_{iib} | | E₅ | |
| 56 | E_{1b}EᵢᵢE_{iib} | | E₅ | |
| 57 | E₁ₐE₄ | | E₅ | |
| 58 | E_{1b}E₄ | | E₅ | |
| 59 | E₁ₐEᵢE₄ | | E₅ | |
| 60 | E_{1b}EᵢE₄ | | E₅ | |
| 61 | E₁ₐEᵢᵢE₄ | | E₅ | |
| 62 | E_{1b}EᵢᵢE₄ | | E₅ | |
| 63 | E₁ₐEᵢᵢE_{iib}E₄ | | E₅ | |
| 64 | E_{1b}EᵢᵢE_{iib}E₄ | | E₅ | |
| 65 | E₁ₐEᵢᵢᵢ | | E₅ | |
| 66 | E_{1b}Eᵢᵢᵢ | | E₅ | |
| 67 | E₁ₐEᵢᵢᵢE₄ | | E₅ | |
| 68 | E_{1b}EᵢᵢᵢE₄ | | E₅ | |
| 69 | E₁ₐEᵢᵥ | | E₅ | |
| 70 | E_{1b}Eᵢᵥ | | E₅ | |
| 71 | E₁ₐEᵢᵥE₄ | | E₅ | |
| 72 | E_{1b}EᵢᵥE₄ | | E₅ | |
| 73 | E₁ₐ | | E₄*E₅ | |
| 74 | E_{1b} | | E₄*E₅ | |
| 75 | E₁ₐEᵢ | | E₄*E₅ | |
| 76 | E_{1b}Eᵢ | | E₄*E₅ | |
| 77 | E₁ₐEᵢᵢ | | E₄*E₅ | |
| 78 | E_{1b}Eᵢᵢ | | E₄*E₅ | |
| 79 | E₁ₐEᵢᵢE_{iib} | | E₄*E₅ | |
| 80 | E_{1b}EᵢᵢE_{iib} | | E₄*E₅ | |
| 81 | E₁ₐE₄ | | E₄*E₅ | |
| 82 | E_{1b}E₄ | | E₄*E₅ | |
| 83 | E₁ₐEᵢE₄ | | E₄*E₅ | |
| 84 | E_{1b}EᵢE₄ | | E₄*E₅ | |
| 85 | E₁ₐEᵢᵢE₄ | | E₄*E₅ | |
| 86 | E_{1b}EᵢᵢE₄ | | E₄*E₅ | |
| 87 | E₁ₐEᵢᵢE_{iib}E₄ | | E₄*E₅ | |
| 88 | E_{1b}EᵢᵢE_{iib}E₄ | | E₄*E₅ | |
| 89 | E₁ₐEᵢᵢᵢ | | E₄*E₅ | |
| 90 | E_{1b}Eᵢᵢᵢ | | E₄*E₅ | |
| 91 | E₁ₐEᵢᵢᵢE₄ | | E₄*E₅ | |
| 92 | E_{1b}EᵢᵢᵢE₄ | | E₄*E₅ | |
| 93 | E₁ₐEᵢᵥ | | E₄*E₅ | |
| 94 | E_{1b}Eᵢᵥ | | E₄*E₅ | |
| 95 | E₁ₐEᵢᵥE₄ | | E₄*E₅ | |
| 96 | E_{1b}EᵢᵥE₄ | | E₄*E₅ | |
| 97 | E₁ₐ | AlkL | | |
| 98 | E_{1b} | AlkL | | |
| 99 | E₁ₐEᵢ | AlkL | | |
| 100 | E_{1b}Eᵢ | AlkL | | |
| 101 | E₁ₐEᵢᵢ | AlkL | | |
| 102 | E_{1b}Eᵢᵢ | AlkL | | |
| 103 | E₁ₐEᵢᵢE_{iib} | AlkL | | |
| 104 | E_{1b}EᵢᵢE_{iib} | AlkL | | |
| 105 | E₁ₐE₄ | AlkL | | |
| 106 | E_{1b}E₄ | AlkL | | |
| 107 | E₁ₐEᵢE₄ | AlkL | | |
| 108 | E_{1b}EᵢE₄ | AlkL | | |
| 109 | E₁ₐEᵢᵢE₄ | AlkL | | |
| 110 | E_{1b}EᵢᵢE₄ | AlkL | | |
| 111 | E₁ₐEᵢᵢE_{iib}E₄ | AlkL | | |
| 112 | E_{1b}EᵢᵢE_{iib}E₄ | AlkL | | |
| 113 | E₁ₐEᵢᵢᵢ | AlkL | | |
| 114 | E_{1b}Eᵢᵢᵢ | AlkL | | |
| 115 | E₁ₐEᵢᵢᵢE₄ | AlkL | | |
| 116 | E_{1b}EᵢᵢᵢE₄ | AlkL | | |
| 117 | E₁ₐEᵢᵥ | AlkL | | |
| 118 | E_{1b}Eᵢᵥ | AlkL | | |
| 119 | E₁ₐEᵢᵥE₄ | AlkL | | |
| 120 | E_{1b}EᵢᵥE₄ | AlkL | | |
| 121 | E₁ₐ | AlkL | E₄* | |
| 122 | E_{1b} | AlkL | E₄* | |
| 123 | E₁ₐEᵢ | AlkL | E₄* | |
| 124 | E_{1b}Eᵢ | AlkL | E₄* | |
| 125 | E₁ₐEᵢᵢ | AlkL | E₄* | |
| 126 | E_{1b}Eᵢᵢ | AlkL | E₄* | |
| 127 | E₁ₐEᵢᵢE_{iib} | AlkL | E₄* | |
| 128 | E_{1b}EᵢᵢE_{iib} | AlkL | E₄* | |
| 129 | E₁ₐE₄ | AlkL | E₄* | |
| 130 | E_{1b}E₄ | AlkL | E₄* | |
| 131 | E₁ₐEᵢE₄ | AlkL | E₄* | |
| 132 | E_{1b}EᵢE₄ | AlkL | E₄* | |
| 133 | E₁ₐEᵢᵢE₄ | AlkL | E₄* | |
| 134 | E_{1b}EᵢᵢE₄ | AlkL | E₄* | |
| 135 | E₁ₐEᵢᵢE_{iib}E₄ | AlkL | E₄* | |
| 136 | E_{1b}EᵢᵢE_{iib}E₄ | AlkL | E₄* | |
| 137 | E₁ₐEᵢᵢᵢ | AlkL | E₄* | |
| 138 | E_{1b}Eᵢᵢᵢ | AlkL | E₄* | |
| 139 | E₁ₐEᵢᵢᵢE₄ | AlkL | E₄* | |
| 140 | E_{1b}EᵢᵢᵢE₄ | AlkL | E₄* | |
| 141 | E₁ₐEᵢᵥ | AlkL | E₄* | |
| 142 | E_{1b}Eᵢᵥ | AlkL | E₄* | |
| 143 | E₁ₐEᵢᵥE₄ | AlkL | E₄* | |
| 144 | E_{1b}EᵢᵥE₄ | AlkL | E₄* | |
| 145 | E₁ₐ | AlkL | E₅ | |
| 146 | E_{1b} | AlkL | E₅ | |
| 147 | E₁ₐEᵢ | AlkL | E₅ | |
| 148 | E_{1b}Eᵢ | AlkL | E₅ | |
| 149 | E₁ₐEᵢᵢ | AlkL | E₅ | |
| 150 | E_{1b}Eᵢᵢ | AlkL | E₅ | |
| 151 | E₁ₐEᵢᵢE_{iib} | AlkL | E₅ | |
| 152 | E_{1b}EᵢᵢE_{iib} | AlkL | E₅ | |
| 153 | E₁ₐE₄ | AlkL | E₅ | |
| 154 | E_{1b}E₄ | AlkL | E₅ | |
| 155 | E₁ₐEᵢE₄ | AlkL | E₅ | |
| 156 | E_{1b}EᵢE₄ | AlkL | E₅ | |
| 157 | E₁ₐEᵢᵢE₄ | AlkL | E₅ | |
| 158 | E_{1b}EᵢᵢE₄ | AlkL | E₅ | |
| 159 | E₁ₐEᵢᵢE_{iib}E₄ | AlkL | E₅ | |
| 160 | E_{1b}EᵢᵢE_{iib}E₄ | AlkL | E₅ | |
| 161 | E₁ₐEᵢᵢᵢ | AlkL | E₅ | |
| 162 | E_{1b}Eᵢᵢᵢ | AlkL | E₅ | |
| 163 | E₁ₐEᵢᵢᵢE₄ | AlkL | E₅ | |
| 164 | E_{1b}EᵢᵢᵢE₄ | AlkL | E₅ | |
| 165 | E₁ₐEᵢᵥ | AlkL | E₅ | |
| 166 | E_{1b}Eᵢᵥ | AlkL | E₅ | |
| 167 | E₁ₐEᵢᵥE₄ | AlkL | E₅ | |
| 168 | E_{1b}EᵢᵥE₄ | AlkL | E₅ | |
| 169 | E₁ₐ | AlkL | E₄*E₅ | |
| 170 | E_{1b} | AlkL | E₄*E₅ | |
| 171 | E₁ₐEᵢ | AlkL | E₄*E₅ | |
| 172 | E_{1b}Eᵢ | AlkL | E₄*E₅ | |
| 173 | E₁ₐEᵢᵢ | AlkL | E₄*E₅ | |
| 174 | E_{1b}Eᵢᵢ | AlkL | E₄*E₅ | |
| 175 | E₁ₐEᵢᵢE_{iib} | AlkL | E₄*E₅ | |
| 176 | E_{1b}EᵢᵢE_{iib} | AlkL | E₄*E₅ | |
| 177 | E₁ₐE₄ | AlkL | E₄*E₅ | |
| 178 | E_{1b}E₄ | AlkL | E₄*E₅ | |
| 179 | E₁ₐEᵢE₄ | AlkL | E₄*E₅ | |
| 180 | E_{1b}EᵢE₄ | AlkL | E₄*E₅ | |
| 181 | E₁ₐEᵢᵢE₄ | AlkL | E₄*E₅ | |
| 182 | E_{1b}EᵢᵢE₄ | AlkL | E₄*E₅ | |
| 183 | E₁ₐEᵢᵢE_{iib}E₄ | AlkL | E₄*E₅ | |
| 184 | E_{1b}EᵢᵢE_{iib}E₄ | AlkL | E₄*E₅ | |
| 185 | E₁ₐEᵢᵢᵢ | AlkL | E₄*E₅ | |
| 186 | E_{1b}Eᵢᵢᵢ | AlkL | E₄*E₅ | |
| 187 | E₁ₐEᵢᵢᵢE₄ | AlkL | E₄*E₅ | |
| 188 | E_{1b}EᵢᵢᵢE₄ | AlkL | E₄*E₅ | |
| 189 | E₁ₐEᵢᵥ | AlkL | E₄*E₅ | |
| 190 | E_{1b}Eᵢᵥ | AlkL | E₄*E₅ | |
| 191 | E₁ₐEᵢᵥE₄ | AlkL | E₄*E₅ | |
| 192 | E_{1b}EᵢᵥE₄ | AlkL | E₄*E₅ | |
| 193 | E₁ₐ | | | Eₐ |
| 194 | E_{1b} | | | Eₐ |
| 195 | E₁ₐEᵢ | | | Eₐ |
| 196 | E_{1b}Eᵢ | | | Eₐ |
| 197 | E₁ₐEᵢᵢ | | | Eₐ |
| 198 | E_{1b}Eᵢᵢ | | | Eₐ |
| 199 | E₁ₐEᵢᵢE_{iib} | | | Eₐ |
| 200 | E_{1b}EᵢᵢE_{iib} | | | Eₐ |
| 201 | E₁ₐE₄ | | | Eₐ |
| 202 | E_{1b}E₄ | | | Eₐ |
| 203 | E₁ₐEᵢE₄ | | | Eₐ |
| 204 | E_{1b}EᵢE₄ | | | Eₐ |
| 205 | E₁ₐEᵢᵢE₄ | | | Eₐ |
| 206 | E_{1b}EᵢᵢE₄ | | | Eₐ |
| 207 | E₁ₐEᵢᵢE_{iib}E₄ | | | Eₐ |
| 208 | E_{1b}EᵢᵢE_{iib}E₄ | | | Eₐ |
| 209 | E₁ₐEᵢᵢᵢ | | | Eₐ |
| 210 | E_{1b}Eᵢᵢᵢ | | | Eₐ |
| 211 | E₁ₐEᵢᵢᵢE₄ | | | Eₐ |
| 212 | E_{1b}EᵢᵢᵢE₄ | | | Eₐ |
| 213 | E₁ₐEᵢᵥ | | | Eₐ |
| 214 | E_{1b}Eᵢᵥ | | | Eₐ |
| 215 | E₁ₐEᵢᵥE₄ | | | Eₐ |
| 216 | E_{1b}EᵢᵥE₄ | | | Eₐ |
| 217 | E₁ₐ | | E₄* | Eₐ |
| 218 | E_{1b} | | E₄* | Eₐ |
| 219 | E₁ₐEᵢ | | E₄* | Eₐ |
| 220 | E_{1b}Eᵢ | | E₄* | Eₐ |
| 221 | E₁ₐEᵢᵢ | | E₄* | Eₐ |
| 222 | E_{1b}Eᵢᵢ | | E₄* | Eₐ |
| 223 | E₁ₐEᵢᵢE_{iib} | | E₄* | Eₐ |
| 224 | E_{1b}EᵢᵢE_{iib} | | E₄* | Eₐ |
| 225 | E₁ₐE₄ | | E₄* | Eₐ |
| 226 | E_{1b}E₄ | | E₄* | Eₐ |
| 227 | E₁ₐEᵢE₄ | | E₄* | Eₐ |
| 228 | E_{1b}EᵢE₄ | | E₄* | Eₐ |
| 229 | E₁ₐEᵢᵢE₄ | | E₄* | Eₐ |
| 230 | E_{1b}EᵢᵢE₄ | | E₄* | Eₐ |
| 231 | E₁ₐEᵢᵢE_{iib}E₄ | | E₄* | Eₐ |
| 232 | E_{1b}EᵢᵢE_{iib}E₄ | | E₄* | Eₐ |
| 233 | E₁ₐEᵢᵢᵢ | | E₄* | Eₐ |
| 234 | E_{1b}Eᵢᵢᵢ | | E₄* | Eₐ |
| 235 | E₁ₐEᵢᵢᵢE₄ | | E₄* | Eₐ |
| 236 | E_{1b}EᵢᵢᵢE₄ | | E₄* | Eₐ |
| 237 | E₁ₐEᵢᵥ | | E₄* | Eₐ |
| 238 | E_{1b}Eᵢᵥ | | E₄* | Eₐ |
| 239 | E₁ₐEᵢᵥE₄ | | E₄* | Eₐ |
| 240 | E_{1b}EᵢᵥE₄ | | E₄* | Eₐ |
| 241 | E₁ₐ | | E₅ | Eₐ |
| 242 | E_{1b} | | E₅ | Eₐ |
| 243 | E₁ₐEᵢ | | E₅ | Eₐ |
| 244 | E_{1b}Eᵢ | | E₅ | Eₐ |
| 245 | E₁ₐEᵢᵢ | | E₅ | Eₐ |
| 246 | E_{1b}Eᵢᵢ | | E₅ | Eₐ |
| 247 | E₁ₐEᵢᵢE_{iib} | | E₅ | Eₐ |
| 248 | E_{1b}EᵢᵢE_{iib} | | E₅ | Eₐ |
| 249 | E₁ₐE₄ | | E₅ | Eₐ |
| 250 | E_{1b}E₄ | | E₅ | Eₐ |
| 251 | E₁ₐEᵢE₄ | | E₅ | Eₐ |
| 252 | E_{1b}EᵢE₄ | | E₅ | Eₐ |
| 253 | E₁ₐEᵢᵢE₄ | | E₅ | Eₐ |
| 254 | E_{1b}EᵢᵢE₄ | | E₅ | Eₐ |
| 255 | E₁ₐEᵢᵢE_{iib}E₄ | | E₅ | Eₐ |
| 256 | E_{1b}EᵢᵢE_{iib}E₄ | | E₅ | Eₐ |
| 257 | E₁ₐEᵢᵢᵢ | | E₅ | Eₐ |
| 258 | E_{1b}Eᵢᵢᵢ | | E₅ | Eₐ |
| 259 | E₁ₐEᵢᵢᵢE₄ | | E₅ | Eₐ |
| 260 | E_{1b}EᵢᵢᵢE₄ | | E₅ | Eₐ |
| 261 | E₁ₐEᵢᵥ | | E₅ | Eₐ |
| 262 | E_{1b}Eᵢᵥ | | E₅ | Eₐ |
| 263 | E₁ₐEᵢᵥE₄ | | E₅ | Eₐ |
| 264 | E_{1b}EᵢᵥE₄ | | E₅ | Eₐ |
| 265 | E₁ₐ | | E₄*E₅ | Eₐ |
| 266 | E_{1b} | | E₄*E₅ | Eₐ |
| 267 | E₁ₐEᵢ | | E₄*E₅ | Eₐ |
| 268 | E_{1b}Eᵢ | | E₄*E₅ | Eₐ |
| 269 | E₁ₐEᵢᵢ | | E₄*E₅ | Eₐ |
| 270 | E_{1b}Eᵢᵢ | | E₄*E₅ | Eₐ |
| 271 | E₁ₐEᵢᵢE_{iib} | | E₄*E₅ | Eₐ |
| 272 | E_{1b}EᵢᵢE_{iib} | | E₄*E₅ | Eₐ |
| 273 | E₁ₐE₄ | | E₄*E₅ | Eₐ |
| 274 | E_{1b}E₄ | | E₄*E₅ | Eₐ |
| 275 | E₁ₐEᵢE₄ | | E₄*E₅ | Eₐ |
| 276 | E_{1b}EᵢE₄ | | E₄*E₅ | Eₐ |
| 277 | E₁ₐEᵢᵢE₄ | | E₄*E₅ | Eₐ |
| 278 | E_{1b}EᵢᵢE₄ | | E₄*E₅ | Eₐ |
| 279 | E₁ₐEᵢᵢE_{iib}E₄ | | E₄*E₅ | Eₐ |
| 280 | E_{1b}EᵢᵢE_{iib}E₄ | | E₄*E₅ | Eₐ |
| 281 | E₁ₐEᵢᵢᵢ | | E₄*E₅ | Eₐ |
| 282 | E_{1b}Eᵢᵢᵢ | | E₄*E₅ | Eₐ |
| 283 | E₁ₐEᵢᵢᵢE₄ | | E₄*E₅ | Eₐ |
| 284 | E_{1b}EᵢᵢᵢE₄ | | E₄*E₅ | Eₐ |
| 285 | E₁ₐEᵢᵥ | | E₄*E₅ | Eₐ |
| 286 | E_{1b}Eᵢᵥ | | E₄*E₅ | Eₐ |
| 287 | E₁ₐEᵢᵥE₄ | | E₄*E₅ | Eₐ |
| 288 | E_{1b}EᵢᵥE₄ | | E₄*E₅ | Eₐ |
| 289 | E₁ₐ | AlkL | | Eₐ |
| 290 | E_{1b} | AlkL | | Eₐ |
| 291 | E₁ₐEᵢ | AlkL | | Eₐ |
| 292 | E_{1b}Eᵢ | AlkL | | Eₐ |
| 293 | E₁ₐEᵢᵢ | AlkL | | Eₐ |
| 294 | E_{1b}Eᵢᵢ | AlkL | | Eₐ |
| 295 | E₁ₐEᵢᵢE_{iib} | AlkL | | Eₐ |
| 296 | E_{1b}EᵢᵢE_{iib} | AlkL | | Eₐ |
| 297 | E₁ₐE₄ | AlkL | | Eₐ |
| 298 | E_{1b}E₄ | AlkL | | Eₐ |
| 299 | E₁ₐEᵢE₄ | AlkL | | Eₐ |
| 300 | E_{1b}EᵢE₄ | AlkL | | Eₐ |
| 301 | E₁ₐEᵢᵢE₄ | AlkL | | Eₐ |
| 302 | E_{1b}EᵢᵢE₄ | AlkL | | Eₐ |
| 303 | E₁ₐEᵢᵢE_{iib}E₄ | AlkL | | Eₐ |
| 304 | E_{1b}EᵢᵢE_{iib}E₄ | AlkL | | Eₐ |
| 305 | E₁ₐEᵢᵢᵢ | AlkL | | Eₐ |
| 306 | E_{1b}Eᵢᵢᵢ | AlkL | | Eₐ |
| 307 | E₁ₐEᵢᵢᵢE₄ | AlkL | | Eₐ |
| 308 | E_{1b}EᵢᵢᵢE₄ | AlkL | | Eₐ |
| 309 | E₁ₐEᵢᵥ | AlkL | | Eₐ |
| 310 | E_{1b}Eᵢᵥ | AlkL | | Eₐ |
| 311 | E₁ₐEᵢᵥE₄ | AlkL | | Eₐ |
| 312 | E_{1b}EᵢᵥE₄ | AlkL | | Eₐ |
| 313 | E₁ₐ | AlkL | E₄* | Eₐ |
| 314 | E_{1b} | AlkL | E₄* | Eₐ |
| 315 | E₁ₐEᵢ | AlkL | E₄* | Eₐ |
| 316 | E_{1b}Eᵢ | AlkL | E₄* | Eₐ |
| 317 | E₁ₐEᵢᵢ | AlkL | E₄* | Eₐ |
| 318 | E_{1b}Eᵢᵢ | AlkL | E₄* | Eₐ |
| 319 | E₁ₐEᵢᵢE_{iib} | AlkL | E₄* | Eₐ |
| 320 | E_{1b}EᵢᵢE_{iib} | AlkL | E₄* | Eₐ |
| 321 | E₁ₐE₄ | AlkL | E₄* | Eₐ |
| 322 | E_{1b}E₄ | AlkL | E₄* | Eₐ |
| 323 | E₁ₐEᵢE₄ | AlkL | E₄* | Eₐ |
| 324 | E_{1b}EᵢE₄ | AlkL | E₄* | Eₐ |
| 325 | E₁ₐEᵢᵢE₄ | AlkL | E₄* | Eₐ |
| 326 | E_{1b}EᵢᵢE₄ | AlkL | E₄* | Eₐ |
| 327 | E₁ₐEᵢᵢE_{iib}E₄ | AlkL | E₄* | Eₐ |
| 328 | E_{1b}EᵢᵢE_{iib}E₄ | AlkL | E₄* | Eₐ |
| 329 | E₁ₐEᵢᵢᵢ | AlkL | E₄* | Eₐ |
| 330 | E_{1b}Eᵢᵢᵢ | AlkL | E₄* | Eₐ |
| 331 | E₁ₐEᵢᵢᵢE₄ | AlkL | E₄* | Eₐ |
| 332 | E_{1b}EᵢᵢᵢE₄ | AlkL | E₄* | Eₐ |
| 333 | E₁ₐEᵢᵥ | AlkL | E₄* | Eₐ |
| 334 | E_{1b}Eᵢᵥ | AlkL | E₄* | Eₐ |
| 335 | E₁ₐEᵢᵥE₄ | AlkL | E₄* | Eₐ |
| 336 | E_{1b}EᵢᵥE₄ | AlkL | E₄* | Eₐ |
| 337 | E₁ₐ | AlkL | E₅ | Eₐ |
| 338 | E_{1b} | AlkL | E₅ | Eₐ |
| 339 | E₁ₐEᵢ | AlkL | E₅ | Eₐ |
| 340 | E_{1b}Eᵢ | AlkL | E₅ | Eₐ |
| 341 | E₁ₐEᵢᵢ | AlkL | E₅ | Eₐ |
| 342 | E_{1b}Eᵢᵢ | AlkL | E₅ | Eₐ |
| 343 | E₁ₐEᵢᵢE_{iib} | AlkL | E₅ | Eₐ |
| 344 | E_{1b}EᵢᵢE_{iib} | AlkL | E₅ | Eₐ |
| 345 | E₁ₐE₄ | AlkL | E₅ | Eₐ |
| 346 | E_{1b}E₄ | AlkL | E₅ | Eₐ |
| 347 | E₁ₐEᵢE₄ | AlkL | E₅ | Eₐ |
| 348 | E_{1b}EᵢE₄ | AlkL | E₅ | Eₐ |
| 349 | E₁ₐEᵢᵢE₄ | AlkL | E₅ | Eₐ |
| 350 | E_{1b}EᵢᵢE₄ | AlkL | E₅ | Eₐ |
| 351 | E₁ₐEᵢᵢE_{iib}E₄ | AlkL | E₅ | Eₐ |
| 352 | E_{1b}EᵢᵢE_{iib}E₄ | AlkL | E₅ | Eₐ |
| 353 | E₁ₐEᵢᵢᵢ | AlkL | E₅ | Eₐ |
| 354 | E_{1b}Eᵢᵢᵢ | AlkL | E₅ | Eₐ |
| 355 | E₁ₐEᵢᵢᵢE₄ | AlkL | E₅ | Eₐ |
| 356 | E_{1b}EᵢᵢᵢE₄ | AlkL | E₅ | Eₐ |
| 357 | E₁ₐEᵢᵥ | AlkL | E₅ | Eₐ |
| 358 | E_{1b}Eᵢᵥ | AlkL | E₅ | Eₐ |
| 359 | E₁ₐEᵢᵥE₄ | AlkL | E₅ | Eₐ |
| 360 | E_{1b}EᵢᵥE₄ | AlkL | E₅ | Eₐ |
| 361 | E₁ₐ | AlkL | E₄*E₅ | Eₐ |
| 362 | E_{1b} | AlkL | E₄*E₅ | Eₐ |
| 363 | E₁ₐEᵢ | AlkL | E₄*E₅ | Eₐ |
| 364 | E_{1b}Eᵢ | AlkL | E₄*E₅ | Eₐ |
| 365 | E₁ₐEᵢᵢ | AlkL | E₄*E₅ | Eₐ |
| 366 | E_{1b}Eᵢᵢ | AlkL | E₄*E₅ | Eₐ |
| 367 | E₁ₐEᵢᵢE_{iib} | AlkL | E₄*E₅ | Eₐ |
| 368 | E_{1b}EᵢᵢE_{iib} | AlkL | E₄*E₅ | Eₐ |
| 369 | E₁ₐE₄ | AlkL | E₄*E₅ | Eₐ |
| 370 | E_{1b}E₄ | AlkL | E₄*E₅ | Eₐ |
| 371 | E₁ₐEᵢE₄ | AlkL | E₄*E₅ | Eₐ |
| 372 | E_{1b}EᵢE₄ | AlkL | E₄*E₅ | Eₐ |
| 373 | E₁ₐEᵢᵢE₄ | AlkL | E₄*E₅ | Eₐ |
| 374 | E_{1b}EᵢᵢE₄ | AlkL | E₄*E₅ | Eₐ |
| 375 | E₁ₐEᵢᵢE_{iib}E₄ | AlkL | E₄*E₅ | Eₐ |
| 376 | E_{1b}EᵢᵢE_{iib}E₄ | AlkL | E₄*E₅ | Eₐ |
| 377 | E₁ₐEᵢᵢᵢ | AlkL | E₄*E₅ | Eₐ |
| 378 | E_{1b}Eᵢᵢᵢ | AlkL | E₄*E₅ | Eₐ |
| 379 | E₁ₐEᵢᵢᵢE₄ | AlkL | E₄*E₅ | Eₐ |
| 380 | E_{1b}EᵢᵢᵢE₄ | AlkL | E₄*E₅ | Eₐ |
| 381 | E₁ₐEᵢᵥ | AlkL | E₄*E₅ | Eₐ |
| 382 | E_{1b}Eᵢᵥ | AlkL | E₄*E₅ | Eₐ |
| 383 | E₁ₐEᵢᵥE₄ | AlkL | E₄*E₅ | Eₐ |
| 384 | E_{1b}EᵢᵥE₄ | AlkL | E₄*E₅ | Eₐ |
| 385 | E₁ₐ | | | E_{b} |
| 386 | E_{1b} | | | E_{b} |
| 387 | E₁ₐEᵢ | | | E_{b} |
| 388 | E_{1b}Eᵢ | | | E_{b} |
| 389 | E₁ₐEᵢᵢ | | | E_{b} |
| 390 | E_{1b}Eᵢᵢ | | | E_{b} |
| 391 | E₁ₐEᵢᵢE_{iib} | | | E_{b} |
| 392 | E_{1b}EᵢᵢE_{iib} | | | E_{b} |
| 393 | E₁ₐE₄ | | | E_{b} |
| 394 | E_{1b}E₄ | | | E_{b} |
| 395 | E₁ₐEᵢE₄ | | | E_{b} |
| 396 | E_{1b}EᵢE₄ | | | E_{b} |
| 397 | E₁ₐEᵢᵢE₄ | | | E_{b} |
| 398 | E_{1b}EᵢᵢE₄ | | | E_{b} |
| 399 | E₁ₐEᵢᵢE_{iib}E₄ | | | E_{b} |
| 400 | E_{1b}EᵢᵢE_{iib}E₄ | | | E_{b} |
| 401 | E₁ₐEᵢᵢᵢ | | | E_{b} |
| 402 | E_{1b}Eᵢᵢᵢ | | | E_{b} |
| 403 | E₁ₐEᵢᵢᵢE₄ | | | E_{b} |
| 404 | E_{1b}EᵢᵢᵢE₄ | | | E_{b} |
| 405 | E₁ₐEᵢᵥ | | | E_{b} |
| 406 | E_{1b}Eᵢᵥ | | | E_{b} |
| 407 | E₁ₐEᵢᵥE₄ | | | E_{b} |
| 408 | E_{1b}EᵢᵥE₄ | | | E_{b} |
| 409 | E₁ₐ | | E₄* | E_{b} |
| 410 | E_{1b} | | E₄* | E_{b} |
| 411 | E₁ₐEᵢ | | E₄* | E_{b} |
| 412 | E_{1b}Eᵢ | | E₄* | E_{b} |
| 413 | E₁ₐEᵢᵢ | | E₄* | E_{b} |
| 414 | E_{1b}Eᵢᵢ | | E₄* | E_{b} |
| 415 | E₁ₐEᵢᵢE_{iib} | | E₄* | E_{b} |
| 416 | E_{1b}EᵢᵢE_{iib} | | E₄* | E_{b} |
| 417 | E₁ₐE₄ | | E₄* | E_{b} |
| 418 | E_{1b}E₄ | | E₄* | E_{b} |
| 419 | E₁ₐEᵢE₄ | | E₄* | E_{b} |
| 420 | E_{1b}EᵢE₄ | | E₄* | E_{b} |
| 421 | E₁ₐEᵢᵢE₄ | | E₄* | E_{b} |
| 422 | E_{1b}EᵢᵢE₄ | | E₄* | E_{b} |
| 423 | E₁ₐEᵢᵢE_{iib}E₄ | | E₄* | E_{b} |
| 424 | E_{1b}EᵢᵢE_{iib}E₄ | | E₄* | E_{b} |
| 425 | E₁ₐEᵢᵢᵢ | | E₄* | E_{b} |
| 426 | E_{1b}Eᵢᵢᵢ | | E₄* | E_{b} |
| 427 | E₁ₐEᵢᵢᵢE₄ | | E₄* | E_{b} |
| 428 | E_{1b}EᵢᵢᵢE₄ | | E₄* | E_{b} |
| 429 | E₁ₐEᵢᵥ | | E₄* | E_{b} |
| 430 | E_{1b}Eᵢᵥ | | E₄* | E_{b} |
| 431 | E₁ₐEᵢᵥE₄ | | E₄* | E_{b} |
| 432 | E_{1b}EᵢᵥE₄ | | E₄* | E_{b} |
| 433 | E₁ₐ | | E₅ | E_{b} |
| 434 | E_{1b} | | E₅ | E_{b} |
| 435 | E₁ₐEᵢ | | E₅ | E_{b} |
| 436 | E_{1b}Eᵢ | | E₅ | E_{b} |
| 437 | E₁ₐEᵢᵢ | | E₅ | E_{b} |
| 438 | E_{1b}Eᵢᵢ | | E₅ | E_{b} |
| 439 | E₁ₐEᵢᵢE_{iib} | | E₅ | E_{b} |
| 440 | E_{1b}EᵢᵢE_{iib} | | E₅ | E_{b} |
| 441 | E₁ₐE₄ | | E₅ | E_{b} |
| 442 | E_{1b}E₄ | | E₅ | E_{b} |
| 443 | E₁ₐEᵢE₄ | | E₅ | E_{b} |
| 444 | E_{1b}EᵢE₄ | | E₅ | E_{b} |
| 445 | E₁ₐEᵢᵢE₄ | | E₅ | E_{b} |
| 446 | E_{1b}EᵢᵢE₄ | | E₅ | E_{b} |
| 447 | E₁ₐEᵢᵢE_{iib}E₄ | | E₅ | E_{b} |
| 448 | E_{1b}EᵢᵢE_{iib}E₄ | | E₅ | E_{b} |
| 449 | E₁ₐEᵢᵢᵢ | | E₅ | E_{b} |
| 450 | E_{1b}Eᵢᵢᵢ | | E₅ | E_{b} |
| 451 | E₁ₐEᵢᵢᵢE₄ | | E₅ | E_{b} |
| 452 | E_{1b}EᵢᵢᵢE₄ | | E₅ | E_{b} |
| 453 | E₁ₐEᵢᵥ | | E₅ | E_{b} |
| 454 | E_{1b}Eᵢᵥ | | E₅ | E_{b} |
| 455 | E₁ₐEᵢᵥE₄ | | E₅ | E_{b} |
| 456 | E_{1b}EᵢᵥE₄ | | E₅ | E_{b} |
| 457 | E₁ₐ | | E₄*E₅ | E_{b} |
| 458 | E_{1b} | | E₄*E₅ | E_{b} |
| 459 | E₁ₐEᵢ | | E₄*E₅ | E_{b} |
| 460 | E_{1b}Eᵢ | | E₄*E₅ | E_{b} |
| 461 | E₁ₐEᵢᵢ | | E₄*E₅ | E_{b} |
| 462 | E_{1b}Eᵢᵢ | | E₄*E₅ | E_{b} |
| 463 | E₁ₐEᵢᵢE_{iib} | | E₄*E₅ | E_{b} |
| 464 | E_{1b}EᵢᵢE_{iib} | | E₄*E₅ | E_{b} |
| 465 | E₁ₐE₄ | | E₄*E₅ | E_{b} |
| 466 | E_{1b}E₄ | | E₄*E₅ | E_{b} |
| 467 | E₁ₐEᵢE₄ | | E₄*E₅ | E_{b} |
| 468 | E_{1b}EᵢE₄ | | E₄*E₅ | E_{b} |
| 469 | E₁ₐEᵢᵢE₄ | | E₄*E₅ | E_{b} |
| 470 | E_{1b}EᵢᵢE₄ | | E₄*E₅ | E_{b} |
| 471 | E₁ₐEᵢᵢE_{iib}E₄ | | E₄*E₅ | E_{b} |
| 472 | E_{1b}EᵢᵢE_{iib}E₄ | | E₄*E₅ | E_{b} |
| 473 | E₁ₐEᵢᵢᵢ | | E₄*E₅ | E_{b} |
| 474 | E_{1b}Eᵢᵢᵢ | | E₄*E₅ | E_{b} |
| 475 | E₁ₐEᵢᵢᵢE₄ | | E₄*E₅ | E_{b} |
| 476 | E_{1b}EᵢᵢᵢE₄ | | E₄*E₅ | E_{b} |
| 477 | E₁ₐEᵢᵥ | | E₄*E₅ | E_{b} |
| 478 | E_{1b}Eᵢᵥ | | E₄*E₅ | E_{b} |
| 479 | E₁ₐEᵢᵥE₄ | | E₄*E₅ | E_{b} |
| 480 | E_{1b}EᵢᵥE₄ | | E₄*E₅ | E_{b} |
| 481 | E₁ₐ | AlkL | | E_{b} |
| 482 | E_{1b} | AlkL | | E_{b} |
| 483 | E₁ₐEᵢ | AlkL | | E_{b} |
| 484 | E_{1b}Eᵢ | AlkL | | E_{b} |
| 485 | E₁ₐEᵢᵢ | AlkL | | E_{b} |
| 486 | E_{1b}Eᵢᵢ | AlkL | | E_{b} |
| 487 | E₁ₐEᵢᵢE_{iib} | AlkL | | E_{b} |
| 488 | E_{1b}EᵢᵢE_{iib} | AlkL | | E_{b} |
| 489 | E₁ₐE₄ | AlkL | | E_{b} |
| 490 | E_{1b}E₄ | AlkL | | E_{b} |
| 491 | E₁ₐEᵢE₄ | AlkL | | E_{b} |
| 492 | E_{1b}EᵢE₄ | AlkL | | E_{b} |
| 493 | E₁ₐEᵢᵢE₄ | AlkL | | E_{b} |
| 494 | E_{1b}EᵢᵢE₄ | AlkL | | E_{b} |
| 495 | E₁ₐEᵢᵢE_{iib}E₄ | AlkL | | E_{b} |
| 496 | E_{1b}EᵢᵢE_{iib}E₄ | AlkL | | E_{b} |
| 497 | E₁ₐEᵢᵢᵢ | AlkL | | E_{b} |
| 498 | E_{1b}Eᵢᵢᵢ | AlkL | | E_{b} |
| 499 | E₁ₐEᵢᵢᵢE₄ | AlkL | | E_{b} |
| 500 | E_{1b}EᵢᵢᵢE₄ | AlkL | | E_{b} |
| 501 | E₁ₐEᵢᵥ | AlkL | | E_{b} |
| 502 | E_{1b}Eᵢᵥ | AlkL | | E_{b} |
| 503 | E₁ₐEᵢᵥE₄ | AlkL | | E_{b} |
| 504 | E_{1b}EᵢᵥE₄ | AlkL | | E_{b} |
| 505 | E₁ₐ | AlkL | E₄* | E_{b} |
| 506 | E_{1b} | AlkL | E₄* | E_{b} |
| 507 | E₁ₐEᵢ | AlkL | E₄* | E_{b} |
| 508 | E_{1b}Eᵢ | AlkL | E₄* | E_{b} |
| 509 | E₁ₐEᵢᵢ | AlkL | E₄* | E_{b} |
| 510 | E_{1b}Eᵢᵢ | AlkL | E₄* | E_{b} |
| 511 | E₁ₐEᵢᵢE_{iib} | AlkL | E₄* | E_{b} |
| 512 | E_{1b}EᵢᵢE_{iib} | AlkL | E₄* | E_{b} |
| 513 | E₁ₐE₄ | AlkL | E₄* | E_{b} |
| 514 | E_{1b}E₄ | AlkL | E₄* | E_{b} |
| 515 | E₁ₐEᵢE₄ | AlkL | E₄* | E_{b} |
| 516 | E_{1b}EᵢE₄ | AlkL | E₄* | E_{b} |
| 517 | E₁ₐEᵢᵢE₄ | AlkL | E₄* | E_{b} |
| 518 | E_{1b}EᵢᵢE₄ | AlkL | E₄* | E_{b} |
| 519 | E₁ₐEᵢᵢE_{iib}E₄ | AlkL | E₄* | E_{b} |
| 520 | E_{1b}EᵢᵢE_{iib}E₄ | AlkL | E₄* | E_{b} |
| 521 | E₁ₐEᵢᵢᵢ | AlkL | E₄* | E_{b} |
| 522 | E_{1b}Eᵢᵢᵢ | AlkL | E₄* | E_{b} |
| 523 | E₁ₐEᵢᵢᵢE₄ | AlkL | E₄* | E_{b} |
| 524 | E_{1b}EᵢᵢᵢE₄ | AlkL | E₄* | E_{b} |
| 525 | E₁ₐEᵢᵥ | AlkL | E₄* | E_{b} |
| 526 | E_{1b}Eᵢᵥ | AlkL | E₄* | E_{b} |
| 527 | E₁ₐEᵢᵥE₄ | AlkL | E₄* | E_{b} |
| 528 | E_{1b}EᵢᵥE₄ | AlkL | E₄* | E_{b} |
| 529 | E₁ₐ | AlkL | E₅ | E_{b} |
| 530 | E_{1b} | AlkL | E₅ | E_{b} |
| 531 | E₁ₐEᵢ | AlkL | E₅ | E_{b} |
| 532 | E_{1b}Eᵢ | AlkL | E₅ | E_{b} |
| 533 | E₁ₐEᵢᵢ | AlkL | E₅ | E_{b} |
| 534 | E_{1b}Eᵢᵢ | AlkL | E₅ | E_{b} |
| 535 | E₁ₐEᵢᵢE_{iib} | AlkL | E₅ | E_{b} |
| 536 | E_{1b}EᵢᵢE_{iib} | AlkL | E₅ | E_{b} |
| 537 | E₁ₐE₄ | AlkL | E₅ | E_{b} |
| 538 | E_{1b}E₄ | AlkL | E₅ | E_{b} |
| 539 | E₁ₐEᵢE₄ | AlkL | E₅ | E_{b} |
| 540 | E_{1b}EᵢE₄ | AlkL | E₅ | E_{b} |
| 541 | E₁ₐEᵢᵢE₄ | AlkL | E₅ | E_{b} |
| 542 | E_{1b}EᵢᵢE₄ | AlkL | E₅ | E_{b} |
| 543 | E₁ₐEᵢᵢE_{iib}E₄ | AlkL | E₅ | E_{b} |
| 544 | E_{1b}EᵢᵢE_{iib}E₄ | AlkL | E₅ | E_{b} |
| 545 | E₁ₐEᵢᵢᵢ | AlkL | E₅ | E_{b} |
| 546 | E_{1b}Eᵢᵢᵢ | AlkL | E₅ | E_{b} |
| 547 | E₁ₐEᵢᵢᵢE₄ | AlkL | E₅ | E_{b} |
| 548 | E_{1b}EᵢᵢᵢE₄ | AlkL | E₅ | E_{b} |
| 549 | E₁ₐEᵢᵥ | AlkL | E₅ | E_{b} |
| 550 | E_{1b}Eᵢᵥ | AlkL | E₅ | E_{b} |
| 551 | E₁ₐEᵢᵥE₄ | AlkL | E₅ | E_{b} |
| 552 | E_{1b}EᵢᵥE₄ | AlkL | E₅ | E_{b} |
| 553 | E₁ₐ | AlkL | E₄*E₅ | E_{b} |
| 554 | E_{1b} | AlkL | E₄*E₅ | E_{b} |
| 555 | E₁ₐEᵢ | AlkL | E₄*E₅ | E_{b} |
| 556 | E_{1b}Eᵢ | AlkL | E₄*E₅ | E_{b} |
| 557 | E₁ₐEᵢᵢ | AlkL | E₄*E₅ | E_{b} |
| 558 | E_{1b}Eᵢᵢ | AlkL | E₄*E₅ | E_{b} |
| 559 | E₁ₐEᵢᵢE_{iib} | AlkL | E₄*E₅ | E_{b} |
| 560 | E_{1b}EᵢᵢE_{iib} | AlkL | E₄*E₅ | E_{b} |
| 561 | E₁ₐE₄ | AlkL | E₄*E₅ | E_{b} |
| 562 | E_{1b}E₄ | AlkL | E₄*E₅ | E_{b} |
| 563 | E₁ₐEᵢE₄ | AlkL | E₄*E₅ | E_{b} |
| 564 | E_{1b}EᵢE₄ | AlkL | E₄*E₅ | E_{b} |
| 565 | E₁ₐEᵢᵢE₄ | AlkL | E₄*E₅ | E_{b} |
| 566 | E_{1b}EᵢᵢE₄ | AlkL | E₄*E₅ | E_{b} |
| 567 | E₁ₐEᵢᵢE_{iib}E₄ | AlkL | E₄*E₅ | E_{b} |
| 568 | E_{1b}EᵢᵢE_{iib}E₄ | AlkL | E₄*E₅ | E_{b} |
| 569 | E₁ₐEᵢᵢᵢ | AlkL | E₄*E₅ | E_{b} |
| 570 | E_{1b}Eᵢᵢᵢ | AlkL | E₄*E₅ | E_{b} |
| 571 | E₁ₐEᵢᵢᵢE₄ | AlkL | E₄*E₅ | E_{b} |
| 572 | E_{1b}EᵢᵢᵢE₄ | AlkL | E₄*E₅ | E_{b} |
| 573 | E₁ₐEᵢᵥ | AlkL | E₄*E₅ | E_{b} |
| 574 | E_{1b}Eᵢᵥ | AlkL | E₄*E₅ | E_{b} |
| 575 | E₁ₐEᵢᵥE₄ | AlkL | E₄*E₅ | E_{b} |
| 576 | E_{1b}EᵢᵥE₄ | AlkL | E₄*E₅ | E_{b} |
| 577 | E₁ₐ | | | E_{d} |
| 578 | E_{1b} | | | E_{d} |
| 579 | E₁ₐEᵢ | | | E_{d} |
| 580 | E_{1b}Eᵢ | | | E_{d} |
| 581 | E₁ₐEᵢᵢ | | | E_{d} |
| 582 | E_{1b}Eᵢᵢ | | | E_{d} |
| 583 | E₁ₐEᵢᵢE_{iib} | | | E_{d} |
| 584 | E_{1b}EᵢᵢE_{iib} | | | E_{d} |
| 585 | E₁ₐE₄ | | | E_{d} |
| 586 | E_{1b}E₄ | | | E_{d} |
| 587 | E₁ₐEᵢE₄ | | | E_{d} |
| 588 | E_{1b}EᵢE₄ | | | E_{d} |
| 589 | E₁ₐEᵢᵢE₄ | | | E_{d} |
| 590 | E_{1b}EᵢᵢE₄ | | | E_{d} |
| 591 | E₁ₐEᵢᵢE_{iib}E₄ | | | E_{d} |
| 592 | E_{1b}EᵢᵢE_{iib}E₄ | | | E_{d} |
| 593 | E₁ₐEᵢᵢᵢ | | | E_{d} |
| 594 | E_{1b}Eᵢᵢᵢ | | | E_{d} |
| 595 | E₁ₐEᵢᵢᵢE₄ | | | E_{d} |
| 596 | E_{1b}EᵢᵢᵢE₄ | | | E_{d} |
| 597 | E₁ₐEᵢᵥ | | | E_{d} |
| 598 | E_{1b}Eᵢᵥ | | | E_{d} |
| 599 | E₁ₐEᵢᵥE₄ | | | E_{d} |
| 600 | E_{1b}EᵢᵥE₄ | | | E_{d} |
| 601 | E₁ₐ | | E₄* | E_{d} |
| 602 | E_{1b} | | E₄* | E_{d} |
| 603 | E₁ₐEᵢ | | E₄* | E_{d} |
| 604 | E_{1b}Eᵢ | | E₄* | E_{d} |
| 605 | E₁ₐEᵢᵢ | | E₄* | E_{d} |
| 606 | E_{1b}Eᵢᵢ | | E₄* | E_{d} |
| 607 | E₁ₐEᵢᵢE_{iib} | | E₄* | E_{d} |
| 608 | E_{1b}EᵢᵢE_{iib} | | E₄* | E_{d} |
| 609 | E₁ₐE₄ | | E₄* | E_{d} |
| 610 | E_{1b}E₄ | | E₄* | E_{d} |
| 611 | E₁ₐEᵢE₄ | | E₄* | E_{d} |
| 612 | E_{1b}EᵢE₄ | | E₄* | E_{d} |
| 613 | E₁ₐEᵢᵢE₄ | | E₄* | E_{d} |
| 614 | E_{1b}EᵢᵢE₄ | | E₄* | E_{d} |
| 615 | E₁ₐEᵢᵢE_{iib}E₄ | | E₄* | E_{d} |
| 616 | E_{1b}EᵢᵢE_{iib}E₄ | | E₄* | E_{d} |
| 617 | E₁ₐEᵢᵢᵢ | | E₄* | E_{d} |
| 618 | E_{1b}Eᵢᵢᵢ | | E₄* | E_{d} |
| 619 | E₁ₐEᵢᵢᵢE₄ | | E₄* | E_{d} |
| 620 | E_{1b}EᵢᵢᵢE₄ | | E₄* | E_{d} |
| 621 | E₁ₐEᵢᵥ | | E₄* | E_{d} |
| 622 | E_{1b}Eᵢᵥ | | E₄* | E_{d} |
| 623 | E₁ₐEᵢᵥE₄ | | E₄* | E_{d} |
| 624 | E_{1b}EᵢᵥE₄ | | E₄* | E_{d} |
| 625 | E₁ₐ | | E₅ | E_{d} |
| 626 | E_{1b} | | E₅ | E_{d} |
| 627 | E₁ₐEᵢ | | E₅ | E_{d} |
| 628 | E_{1b}Eᵢ | | E₅ | E_{d} |
| 629 | E₁ₐEᵢᵢ | | E₅ | E_{d} |
| 630 | E_{1b}Eᵢᵢ | | E₅ | E_{d} |
| 631 | E₁ₐEᵢᵢE_{iib} | | E₅ | E_{d} |
| 632 | E_{1b}EᵢᵢE_{iib} | | E₅ | E_{d} |
| 633 | E₁ₐE₄ | | E₅ | E_{d} |
| 634 | E_{1b}E₄ | | E₅ | E_{d} |
| 635 | E₁ₐEᵢE₄ | | E₅ | E_{d} |
| 636 | E_{1b}EᵢE₄ | | E₅ | E_{d} |
| 637 | E₁ₐEᵢᵢE₄ | | E₅ | E_{d} |
| 638 | E_{1b}EᵢᵢE₄ | | E₅ | E_{d} |
| 639 | E₁ₐEᵢᵢE_{iib}E₄ | | E₅ | E_{d} |
| 640 | E_{1b}EᵢᵢE_{iib}E₄ | | E₅ | E_{d} |
| 641 | E₁ₐEᵢᵢᵢ | | E₅ | E_{d} |
| 642 | E_{1b}Eᵢᵢᵢ | | E₅ | E_{d} |
| 643 | E₁ₐEᵢᵢᵢE₄ | | E₅ | E_{d} |
| 644 | E_{1b}EᵢᵢᵢE₄ | | E₅ | E_{d} |
| 645 | E₁ₐEᵢᵥ | | E₅ | E_{d} |
| 646 | E_{1b}Eᵢᵥ | | E₅ | E_{d} |
| 647 | E₁ₐEᵢᵥE₄ | | E₅ | E_{d} |
| 648 | E_{1b}EᵢᵥE₄ | | E₅ | E_{d} |
| 649 | E₁ₐ | | E₄*E₅ | E_{d} |
| 650 | E_{1b} | | E₄*E₅ | E_{d} |
| 651 | E₁ₐEᵢ | | E₄*E₅ | E_{d} |
| 652 | E_{1b}Eᵢ | | E₄*E₅ | E_{d} |
| 653 | E₁ₐEᵢᵢ | | E₄*E₅ | E_{d} |
| 654 | E_{1b}Eᵢᵢ | | E₄*E₅ | E_{d} |
| 655 | E₁ₐEᵢᵢE_{iib} | | E₄*E₅ | E_{d} |
| 656 | E_{1b}EᵢᵢE_{iib} | | E₄*E₅ | E_{d} |
| 657 | E₁ₐE₄ | | E₄*E₅ | E_{d} |
| 658 | E_{1b}E₄ | | E₄*E₅ | E_{d} |
| 659 | E₁ₐEᵢE₄ | | E₄*E₅ | E_{d} |
| 660 | E_{1b}EᵢE₄ | | E₄*E₅ | E_{d} |
| 661 | E₁ₐEᵢᵢE₄ | | E₄*E₅ | E_{d} |
| 662 | E_{1b}EᵢᵢE₄ | | E₄*E₅ | E_{d} |
| 663 | E₁ₐEᵢᵢE_{iib}E₄ | | E₄*E₅ | E_{d} |
| 664 | E_{1b}EᵢᵢE_{iib}E₄ | | E₄*E₅ | E_{d} |
| 665 | E₁ₐEᵢᵢᵢ | | E₄*E₅ | E_{d} |
| 666 | E_{1b}Eᵢᵢᵢ | | E₄*E₅ | E_{d} |
| 667 | E₁ₐEᵢᵢᵢE₄ | | E₄*E₅ | E_{d} |
| 668 | E_{1b}EᵢᵢᵢE₄ | | E₄*E₅ | E_{d} |
| 669 | E₁ₐEᵢᵥ | | E₄*E₅ | E_{d} |
| 670 | E_{1b}Eᵢᵥ | | E₄*E₅ | E_{d} |
| 671 | E₁ₐEᵢᵥE₄ | | E₄*E₅ | E_{d} |
| 672 | E_{1b}EᵢᵥE₄ | | E₄*E₅ | E_{d} |
| 673 | E₁ₐ | AlkL | | E_{d} |
| 674 | E_{1b} | AlkL | | E_{d} |
| 675 | E₁ₐEᵢ | AlkL | | E_{d} |
| 676 | E_{1b}Eᵢ | AlkL | | E_{d} |
| 677 | E₁ₐEᵢᵢ | AlkL | | E_{d} |
| 678 | E_{1b}Eᵢᵢ | AlkL | | E_{d} |
| 679 | E₁ₐEᵢᵢE_{iib} | AlkL | | E_{d} |
| 680 | E_{1b}EᵢᵢE_{iib} | AlkL | | E_{d} |
| 681 | E₁ₐE₄ | AlkL | | E_{d} |
| 682 | E_{1b}E₄ | AlkL | | E_{d} |
| 683 | E₁ₐEᵢE₄ | AlkL | | E_{d} |
| 684 | E_{1b}EᵢE₄ | AlkL | | E_{d} |
| 685 | E₁ₐEᵢᵢE₄ | AlkL | | E_{d} |
| 686 | E_{1b}EᵢᵢE₄ | AlkL | | E_{d} |
| 687 | E₁ₐEᵢᵢE_{iib}E₄ | AlkL | | E_{d} |
| 688 | E_{1b}EᵢᵢE_{iib}E₄ | AlkL | | E_{d} |
| 689 | E₁ₐEᵢᵢᵢ | AlkL | | E_{d} |
| 690 | E_{1b}Eᵢᵢᵢ | AlkL | | E_{d} |
| 691 | E₁ₐEᵢᵢᵢE₄ | AlkL | | E_{d} |
| 692 | E_{1b}EᵢᵢᵢE₄ | AlkL | | E_{d} |
| 693 | E₁ₐEᵢᵥ | AlkL | | E_{d} |
| 694 | E_{1b}Eᵢᵥ | AlkL | | E_{d} |
| 695 | E₁ₐEᵢᵥE₄ | AlkL | | E_{d} |
| 696 | E_{1b}EᵢᵥE₄ | AlkL | | E_{d} |
| 697 | E₁ₐ | AlkL | E₄* | E_{d} |
| 698 | E_{1b} | AlkL | E₄* | E_{d} |
| 699 | E₁ₐEᵢ | AlkL | E₄* | E_{d} |
| 700 | E_{1b}Eᵢ | AlkL | E₄* | E_{d} |
| 701 | E₁ₐEᵢᵢ | AlkL | E₄* | E_{d} |
| 702 | E_{1b}Eᵢᵢ | AlkL | E₄* | E_{d} |
| 703 | E₁ₐEᵢᵢE_{iib} | AlkL | E₄* | E_{d} |
| 704 | E_{1b}EᵢᵢE_{iib} | AlkL | E₄* | E_{d} |
| 705 | E₁ₐE₄ | AlkL | E₄* | E_{d} |
| 706 | E_{1b}E₄ | AlkL | E₄* | E_{d} |
| 707 | E₁ₐEᵢE₄ | AlkL | E₄* | E_{d} |
| 708 | E_{1b}EᵢE₄ | AlkL | E₄* | E_{d} |
| 709 | E₁ₐEᵢᵢE₄ | AlkL | E₄* | E_{d} |
| 710 | E_{1b}EᵢᵢE₄ | AlkL | E₄* | E_{d} |
| 711 | E₁ₐEᵢᵢE_{iib}E₄ | AlkL | E₄* | E_{d} |
| 712 | E_{1b}EᵢᵢE_{iib}E₄ | AlkL | E₄* | E_{d} |
| 713 | E₁ₐEᵢᵢᵢ | AlkL | E₄* | E_{d} |
| 714 | E_{1b}Eᵢᵢᵢ | AlkL | E₄* | E_{d} |
| 715 | E₁ₐEᵢᵢᵢE₄ | AlkL | E₄* | E_{d} |
| 716 | E_{1b}EᵢᵢᵢE₄ | AlkL | E₄* | E_{d} |
| 717 | E₁ₐEᵢᵥ | AlkL | E₄* | E_{d} |
| 718 | E_{1b}Eᵢᵥ | AlkL | E₄* | E_{d} |
| 719 | E₁ₐEᵢᵥE₄ | AlkL | E₄* | E_{d} |
| 720 | E_{1b}EᵢᵥE₄ | AlkL | E₄* | E_{d} |
| 721 | E₁ₐ | AlkL | E₅ | E_{d} |
| 722 | E_{1b} | AlkL | E₅ | E_{d} |
| 723 | E₁ₐEᵢ | AlkL | E₅ | E_{d} |
| 724 | E_{1b}Eᵢ | AlkL | E₅ | E_{d} |
| 725 | E₁ₐEᵢᵢ | AlkL | E₅ | E_{d} |
| 726 | E_{1b}Eᵢᵢ | AlkL | E₅ | E_{d} |
| 727 | E₁ₐEᵢᵢE_{iib} | AlkL | E₅ | E_{d} |
| 728 | E_{1b}EᵢᵢE_{iib} | AlkL | E₅ | E_{d} |
| 729 | E₁ₐE₄ | AlkL | E₅ | E_{d} |
| 730 | E_{1b}E₄ | AlkL | E₅ | E_{d} |
| 731 | E₁ₐEᵢE₄ | AlkL | E₅ | E_{d} |
| 732 | E_{1b}EᵢE₄ | AlkL | E₅ | E_{d} |
| 733 | E₁ₐEᵢᵢE₄ | AlkL | E₅ | E_{d} |
| 734 | E_{1b}EᵢᵢE₄ | AlkL | E₅ | E_{d} |
| 735 | E₁ₐEᵢᵢE_{iib}E₄ | AlkL | E₅ | E_{d} |
| 736 | E_{1b}EᵢᵢE_{iib}E₄ | AlkL | E₅ | E_{d} |
| 737 | E₁ₐEᵢᵢᵢ | AlkL | E₅ | E_{d} |
| 738 | E_{1b}Eᵢᵢᵢ | AlkL | E₅ | E_{d} |
| 739 | E₁ₐEᵢᵢᵢE₄ | AlkL | E₅ | E_{d} |
| 740 | E_{1b}EᵢᵢᵢE₄ | AlkL | E₅ | E_{d} |
| 741 | E₁ₐEᵢᵥ | AlkL | E₅ | E_{d} |
| 742 | E_{1b}Eᵢᵥ | AlkL | E₅ | E_{d} |
| 743 | E₁ₐEᵢᵥE₄ | AlkL | E₅ | E_{d} |
| 744 | E_{1b}EᵢᵥE₄ | AlkL | E₅ | E_{d} |
| 745 | E₁ₐ | AlkL | E₄*E₅ | E_{d} |
| 746 | E_{1b} | AlkL | E₄*E₅ | E_{d} |
| 747 | E₁ₐEᵢ | AlkL | E₄*E₅ | E_{d} |
| 748 | E_{1b}Eᵢ | AlkL | E₄*E₅ | E_{d} |
| 749 | E₁ₐEᵢᵢ | AlkL | E₄*E₅ | E_{d} |
| 750 | E_{1b}Eᵢᵢ | AlkL | E₄*E₅ | E_{d} |
| 751 | E₁ₐEᵢᵢE_{iib} | AlkL | E₄*E₅ | E_{d} |
| 752 | E_{1b}EᵢᵢE_{iib} | AlkL | E₄*E₅ | E_{d} |
| 753 | E₁ₐE₄ | AlkL | E₄*E₅ | E_{d} |
| 754 | E_{1b}E₄ | AlkL | E₄*E₅ | E_{d} |
| 755 | E₁ₐEᵢE₄ | AlkL | E₄*E₅ | E_{d} |
| 756 | E_{1b}EᵢE₄ | AlkL | E₄*E₅ | E_{d} |
| 757 | E₁ₐEᵢᵢE₄ | AlkL | E₄*E₅ | E_{d} |
| 758 | E_{1b}EᵢᵢE₄ | AlkL | E₄*E₅ | E_{d} |
| 759 | E₁ₐEᵢᵢE_{iib}E₄ | AlkL | E₄*E₅ | E_{d} |
| 760 | E_{1b}EᵢᵢE_{iib}E₄ | AlkL | E₄*E₅ | E_{d} |
| 761 | E₁ₐEᵢᵢᵢ | AlkL | E₄*E₅ | E_{d} |
| 762 | E_{1b}Eᵢᵢᵢ | AlkL | E₄*E₅ | E_{d} |
| 763 | E₁ₐEᵢᵢᵢE₄ | AlkL | E₄*E₅ | E_{d} |
| 764 | E_{1b}EᵢᵢᵢE₄ | AlkL | E₄*E₅ | E_{d} |
| 765 | E₁ₐEᵢᵥ | AlkL | E₄*E₅ | E_{d} |
| 766 | E_{1b}Eᵢᵥ | AlkL | E₄*E₅ | E_{d} |
| 767 | E₁ₐEᵢᵥE₄ | AlkL | E₄*E₅ | E_{d} |
| 768 | E_{1b}EᵢᵥE₄ | AlkL | E₄*E₅ | E_{d} |
| 769 | E₁ₐ | | | Eₑ |
| 770 | E_{1b} | | | Eₑ |
| 771 | E₁ₐEᵢ | | | Eₑ |
| 772 | E_{1b}Eᵢ | | | Eₑ |
| 773 | E₁ₐEᵢᵢ | | | Eₑ |
| 774 | E_{1b}Eᵢᵢ | | | Eₑ |
| 775 | E₁ₐEᵢᵢE_{iib} | | | Eₑ |
| 776 | E_{1b}EᵢᵢE_{iib} | | | Eₑ |
| 777 | E₁ₐE₄ | | | Eₑ |
| 778 | E_{1b}E₄ | | | Eₑ |
| 779 | E₁ₐEᵢE₄ | | | Eₑ |
| 780 | E_{1b}EᵢE₄ | | | Eₑ |
| 781 | E₁ₐEᵢᵢE₄ | | | Eₑ |
| 782 | E_{1b}EᵢᵢE₄ | | | Eₑ |
| 783 | E₁ₐEᵢᵢE_{iib}E₄ | | | Eₑ |
| 784 | E_{1b}EᵢᵢE_{iib}E₄ | | | Eₑ |
| 785 | E₁ₐEᵢᵢᵢ | | | Eₑ |
| 786 | E_{1b}Eᵢᵢᵢ | | | Eₑ |
| 787 | E₁ₐEᵢᵢᵢE₄ | | | Eₑ |
| 788 | E_{1b}EᵢᵢᵢE₄ | | | Eₑ |
| 789 | E₁ₐEᵢᵥ | | | Eₑ |
| 790 | E_{1b}Eᵢᵥ | | | Eₑ |
| 791 | E₁ₐEᵢᵥE₄ | | | Eₑ |
| 792 | E_{1b}EᵢᵥE₄ | | | Eₑ |
| 793 | E₁ₐ | | E₄* | Eₑ |
| 794 | E_{1b} | | E₄* | Eₑ |
| 795 | E₁ₐEᵢ | | E₄* | Eₑ |
| 796 | E_{1b}Eᵢ | | E₄* | Eₑ |
| 797 | E₁ₐEᵢᵢ | | E₄* | Eₑ |
| 798 | E_{1b}Eᵢᵢ | | E₄* | Eₑ |
| 799 | E₁ₐEᵢᵢE_{iib} | | E₄* | Eₑ |
| 800 | E_{1b}EᵢᵢE_{iib} | | E₄* | Eₑ |
| 801 | E₁ₐE₄ | | E₄* | Eₑ |
| 802 | E_{1b}E₄ | | E₄* | Eₑ |
| 803 | E₁ₐEᵢE₄ | | E₄* | Eₑ |
| 804 | E_{1b}EᵢE₄ | | E₄* | Eₑ |
| 805 | E₁ₐEᵢᵢE₄ | | E₄* | Eₑ |
| 806 | E_{1b}EᵢᵢE₄ | | E₄* | Eₑ |
| 807 | E₁ₐEᵢᵢE_{iib}E₄ | | E₄* | Eₑ |
| 808 | E_{1b}EᵢᵢE_{iib}E₄ | | E₄* | Eₑ |
| 809 | E₁ₐEᵢᵢᵢ | | E₄* | Eₑ |
| 810 | E_{1b}Eᵢᵢᵢ | | E₄* | Eₑ |
| 811 | E₁ₐEᵢᵢᵢE₄ | | E₄* | Eₑ |
| 812 | E_{1b}EᵢᵢᵢE₄ | | E₄* | Eₑ |
| 813 | E₁ₐEᵢᵥ | | E₄* | Eₑ |
| 814 | E_{1b}Eᵢᵥ | | E₄* | Eₑ |
| 815 | E₁ₐEᵢᵥE₄ | | E₄* | Eₑ |
| 816 | E_{1b}EᵢᵥE₄ | | E₄* | Eₑ |
| 817 | E₁ₐ | | E₅ | Eₑ |
| 818 | E_{1b} | | E₅ | Eₑ |
| 819 | E₁ₐEᵢ | | E₅ | Eₑ |
| 820 | E_{1b}Eᵢ | | E₅ | Eₑ |
| 821 | E₁ₐEᵢᵢ | | E₅ | Eₑ |
| 822 | E_{1b}Eᵢᵢ | | E₅ | Eₑ |
| 823 | E₁ₐEᵢᵢE_{iib} | | E₅ | Eₑ |
| 824 | E_{1b}EᵢᵢE_{iib} | | E₅ | Eₑ |
| 825 | E₁ₐE₄ | | E₅ | Eₑ |
| 826 | E_{1b}E₄ | | E₅ | Eₑ |
| 827 | E₁ₐEᵢE₄ | | E₅ | Eₑ |
| 828 | E_{1b}EᵢE₄ | | E₅ | Eₑ |
| 829 | E₁ₐEᵢᵢE₄ | | E₅ | Eₑ |
| 830 | E_{1b}EᵢᵢE₄ | | E₅ | Eₑ |
| 831 | E₁ₐEᵢᵢE_{iib}E₄ | | E₅ | Eₑ |
| 832 | E_{1b}EᵢᵢE_{iib}E₄ | | E₅ | Eₑ |
| 833 | E₁ₐEᵢᵢᵢ | | E₅ | Eₑ |
| 834 | E_{1b}Eᵢᵢᵢ | | E₅ | Eₑ |
| 835 | E₁ₐEᵢᵢᵢE₄ | | E₅ | Eₑ |
| 836 | E_{1b}EᵢᵢᵢE₄ | | E₅ | Eₑ |
| 837 | E₁ₐEᵢᵥ | | E₅ | Eₑ |
| 838 | E_{1b}Eᵢᵥ | | E₅ | Eₑ |
| 839 | E₁ₐEᵢᵥE₄ | | E₅ | Eₑ |
| 840 | E_{1b}EᵢᵥE₄ | | E₅ | Eₑ |
| 841 | E₁ₐ | | E₄*E₅ | Eₑ |
| 842 | E_{1b} | | E₄*E₅ | Eₑ |
| 843 | E₁ₐEᵢ | | E₄*E₅ | Eₑ |
| 844 | E_{1b}Eᵢ | | E₄*E₅ | Eₑ |
| 845 | E₁ₐEᵢᵢ | | E₄*E₅ | Eₑ |
| 846 | E_{1b}Eᵢᵢ | | E₄*E₅ | Eₑ |
| 847 | E₁ₐEᵢᵢE_{iib} | | E₄*E₅ | Eₑ |
| 848 | E_{1b}EᵢᵢE_{iib} | | E₄*E₅ | Eₑ |
| 849 | E₁ₐE₄ | | E₄*E₅ | Eₑ |
| 850 | E_{1b}E₄ | | E₄*E₅ | Eₑ |
| 851 | E₁ₐEᵢE₄ | | E₄*E₅ | Eₑ |
| 852 | E_{1b}EᵢE₄ | | E₄*E₅ | Eₑ |
| 853 | E₁ₐEᵢᵢE₄ | | E₄*E₅ | Eₑ |
| 854 | E_{1b}EᵢᵢE₄ | | E₄*E₅ | Eₑ |
| 855 | E₁ₐEᵢᵢE_{iib}E₄ | | E₄*E₅ | Eₑ |
| 856 | E_{1b}EᵢᵢE_{iib}E₄ | | E₄*E₅ | Eₑ |
| 857 | E₁ₐEᵢᵢᵢ | | E₄*E₅ | Eₑ |
| 858 | E_{1b}Eᵢᵢᵢ | | E₄*E₅ | Eₑ |
| 859 | E₁ₐEᵢᵢᵢE₄ | | E₄*E₅ | Eₑ |
| 860 | E_{1b}EᵢᵢᵢE₄ | | E₄*E₅ | Eₑ |
| 861 | E₁ₐEᵢᵥ | | E₄*E₅ | Eₑ |
| 862 | E_{1b}Eᵢᵥ | | E₄*E₅ | Eₑ |
| 863 | E₁ₐEᵢᵥE₄ | | E₄*E₅ | Eₑ |
| 864 | E_{1b}EᵢᵥE₄ | | E₄*E₅ | Eₑ |
| 865 | E₁ₐ | AlkL | | Eₑ |
| 866 | E_{1b} | AlkL | | Eₑ |
| 867 | E₁ₐEᵢ | AlkL | | Eₑ |
| 868 | E_{1b}Eᵢ | AlkL | | Eₑ |
| 869 | E₁ₐEᵢᵢ | AlkL | | Eₑ |
| 870 | E_{1b}Eᵢᵢ | AlkL | | Eₑ |
| 871 | E₁ₐEᵢᵢE_{iib} | AlkL | | Eₑ |
| 872 | E_{1b}EᵢᵢE_{iib} | AlkL | | Eₑ |
| 873 | E₁ₐE₄ | AlkL | | Eₑ |
| 874 | E_{1b}E₄ | AlkL | | Eₑ |
| 875 | E₁ₐEᵢE₄ | AlkL | | Eₑ |
| 876 | E_{1b}EᵢE₄ | AlkL | | Eₑ |
| 877 | E₁ₐEᵢᵢE₄ | AlkL | | Eₑ |
| 878 | E_{1b}EᵢᵢE₄ | AlkL | | Eₑ |
| 879 | E₁ₐEᵢᵢE_{iib}E₄ | AlkL | | Eₑ |
| 880 | E_{1b}EᵢᵢE_{iib}E₄ | AlkL | | Eₑ |
| 881 | E₁ₐEᵢᵢᵢ | AlkL | | Eₑ |
| 882 | E_{1b}Eᵢᵢᵢ | AlkL | | Eₑ |
| 883 | E₁ₐEᵢᵢᵢE₄ | AlkL | | Eₑ |
| 884 | E_{1b}EᵢᵢᵢE₄ | AlkL | | Eₑ |
| 885 | E₁ₐEᵢᵥ | AlkL | | Eₑ |
| 886 | E_{1b}Eᵢᵥ | AlkL | | Eₑ |
| 887 | E₁ₐEᵢᵥE₄ | AlkL | | Eₑ |
| 888 | E_{1b}EᵢᵥE₄ | AlkL | | Eₑ |
| 889 | E₁ₐ | AlkL | E₄* | Eₑ |
| 890 | E_{1b} | AlkL | E₄* | Eₑ |
| 891 | E₁ₐEᵢ | AlkL | E₄* | Eₑ |
| 892 | E_{1b}Eᵢ | AlkL | E₄* | Eₑ |
| 893 | E₁ₐEᵢᵢ | AlkL | E₄* | Eₑ |
| 894 | E_{1b}Eᵢᵢ | AlkL | E₄* | Eₑ |
| 895 | E₁ₐEᵢᵢE_{iib} | AlkL | E₄* | Eₑ |
| 896 | E_{1b}EᵢᵢE_{iib} | AlkL | E₄* | Eₑ |
| 897 | E₁ₐE₄ | AlkL | E₄* | Eₑ |
| 898 | E_{1b}E₄ | AlkL | E₄* | Eₑ |
| 899 | E₁ₐEᵢE₄ | AlkL | E₄* | Eₑ |
| 900 | E_{1b}EᵢE₄ | AlkL | E₄* | Eₑ |
| 901 | E₁ₐEᵢᵢE₄ | AlkL | E₄* | Eₑ |
| 902 | E_{1b}EᵢᵢE₄ | AlkL | E₄* | Eₑ |
| 903 | E₁ₐEᵢᵢE_{iib}E₄ | AlkL | E₄* | Eₑ |
| 904 | E_{1b}EᵢᵢE_{iib}E₄ | AlkL | E₄* | Eₑ |
| 905 | E₁ₐEᵢᵢᵢ | AlkL | E₄* | Eₑ |
| 906 | E_{1b}Eᵢᵢᵢ | AlkL | E₄* | Eₑ |
| 907 | E₁ₐEᵢᵢᵢE₄ | AlkL | E₄* | Eₑ |
| 908 | E_{1b}EᵢᵢᵢE₄ | AlkL | E₄* | Eₑ |
| 909 | E₁ₐEᵢᵥ | AlkL | E₄* | Eₑ |
| 910 | E_{1b}Eᵢᵥ | AlkL | E₄* | Eₑ |
| 911 | E₁ₐEᵢᵥE₄ | AlkL | E₄* | Eₑ |
| 912 | E_{1b}EᵢᵥE₄ | AlkL | E₄* | Eₑ |
| 913 | E₁ₐ | AlkL | E₅ | Eₑ |
| 914 | E_{1b} | AlkL | E₅ | Eₑ |
| 915 | E₁ₐEᵢ | AlkL | E₅ | Eₑ |
| 916 | E_{1b}Eᵢ | AlkL | E₅ | Eₑ |
| 917 | E₁ₐEᵢᵢ | AlkL | E₅ | Eₑ |
| 918 | E_{1b}Eᵢᵢ | AlkL | E₅ | Eₑ |
| 919 | E₁ₐEᵢᵢE_{iib} | AlkL | E₅ | Eₑ |
| 920 | E_{1b}EᵢᵢE_{iib} | AlkL | E₅ | Eₑ |
| 921 | E₁ₐE₄ | AlkL | E₅ | Eₑ |
| 922 | E_{1b}E₄ | AlkL | E₅ | Eₑ |
| 923 | E₁ₐEᵢE₄ | AlkL | E₅ | Eₑ |
| 924 | E_{1b}EᵢE₄ | AlkL | E₅ | Eₑ |
| 925 | E₁ₐEᵢᵢE₄ | AlkL | E₅ | Eₑ |
| 926 | E_{1b}EᵢᵢE₄ | AlkL | E₅ | Eₑ |
| 927 | E₁ₐEᵢᵢE_{iib}E₄ | AlkL | E₅ | Eₑ |
| 928 | E_{1b}EᵢᵢE_{iib}E₄ | AlkL | E₅ | Eₑ |
| 929 | E₁ₐEᵢᵢᵢ | AlkL | E₅ | Eₑ |
| 930 | E_{1b}Eᵢᵢᵢ | AlkL | E₅ | Eₑ |
| 931 | E₁ₐEᵢᵢᵢE₄ | AlkL | E₅ | Eₑ |
| 932 | E_{1b}EᵢᵢᵢE₄ | AlkL | E₅ | Eₑ |
| 933 | E₁ₐEᵢᵥ | AlkL | E₅ | Eₑ |
| 934 | E_{1b}Eᵢᵥ | AlkL | E₅ | Eₑ |
| 935 | E₁ₐEᵢᵥE₄ | AlkL | E₅ | Eₑ |
| 936 | E_{1b}EᵢᵥE₄ | AlkL | E₅ | Eₑ |
| 937 | E₁ₐ | AlkL | E₄*E₅ | Eₑ |
| 938 | E_{1b} | AlkL | E₄*E₅ | Eₑ |
| 939 | E₁ₐEᵢ | AlkL | E₄*E₅ | Eₑ |
| 940 | E_{1b}Eᵢ | AlkL | E₄*E₅ | Eₑ |
| 941 | E₁ₐEᵢᵢ | AlkL | E₄*E₅ | Eₑ |
| 942 | E_{1b}Eᵢᵢ | AlkL | E₄*E₅ | Eₑ |
| 943 | E₁ₐEᵢᵢE_{iib} | AlkL | E₄*E₅ | Eₑ |
| 944 | E_{1b}EᵢᵢE_{iib} | AlkL | E₄*E₅ | Eₑ |
| 945 | E₁ₐE₄ | AlkL | E₄*E₅ | Eₑ |
| 946 | E_{1b}E₄ | AlkL | E₄*E₅ | Eₑ |
| 947 | E₁ₐEᵢE₄ | AlkL | E₄*E₅ | Eₑ |
| 948 | E_{1b}EᵢE₄ | AlkL | E₄*E₅ | Eₑ |
| 949 | E₁ₐEᵢᵢE₄ | AlkL | E₄*E₅ | Eₑ |
| 950 | E_{1b}EᵢᵢE₄ | AlkL | E₄*E₅ | Eₑ |
| 951 | E₁ₐEᵢᵢE_{iib}E₄ | AlkL | E₄*E₅ | Eₑ |
| 952 | E_{1b}EᵢᵢE_{iib}E₄ | AlkL | E₄*E₅ | Eₑ |
| 953 | E₁ₐEᵢᵢᵢ | AlkL | E₄*E₅ | Eₑ |
| 954 | E_{1b}Eᵢᵢᵢ | AlkL | E₄*E₅ | Eₑ |
| 955 | E₁ₐEᵢᵢᵢE₄ | AlkL | E₄*E₅ | Eₑ |
| 956 | E_{1b}EᵢᵢᵢE₄ | AlkL | E₄*E₅ | Eₑ |
| 957 | E₁ₐEᵢᵥ | AlkL | E₄*E₅ | Eₑ |
| 958 | E_{1b}Eᵢᵥ | AlkL | E₄*E₅ | Eₑ |
| 959 | E₁ₐEᵢᵥE₄ | AlkL | E₄*E₅ | Eₑ |
| 960 | E_{1b}EᵢᵥE₄ | AlkL | E₄*E₅ | Eₑ |
| 961 | E₁ₐ | | | E_{f} |
| 962 | E_{1b} | | | E_{f} |
| 963 | E₁ₐEᵢ | | | E_{f} |
| 964 | E_{1b}Eᵢ | | | E_{f} |
| 965 | E₁ₐEᵢᵢ | | | E_{f} |
| 966 | E_{1b}Eᵢᵢ | | | E_{f} |
| 967 | E₁ₐEᵢᵢE_{iib} | | | E_{f} |
| 968 | E_{1b}EᵢᵢE_{iib} | | | E_{f} |
| 969 | E₁ₐE₄ | | | E_{f} |
| 970 | E_{1b}E₄ | | | E_{f} |
| 971 | E₁ₐEᵢE₄ | | | E_{f} |
| 972 | E_{1b}EᵢE₄ | | | E_{f} |
| 973 | E₁ₐEᵢᵢE₄ | | | E_{f} |
| 974 | E_{1b}EᵢᵢE₄ | | | E_{f} |
| 975 | E₁ₐEᵢᵢE_{iib}E₄ | | | E_{f} |
| 976 | E_{1b}EᵢᵢE_{iib}E₄ | | | E_{f} |
| 977 | E₁ₐEᵢᵢᵢ | | | E_{f} |
| 978 | E_{1b}Eᵢᵢᵢ | | | E_{f} |
| 979 | E₁ₐEᵢᵢᵢE₄ | | | E_{f} |
| 980 | E_{1b}EᵢᵢᵢE₄ | | | E_{f} |
| 981 | E₁ₐEᵢᵥ | | | E_{f} |
| 982 | E_{1b}Eᵢᵥ | | | E_{f} |
| 983 | E₁ₐEᵢᵥE₄ | | | E_{f} |
| 984 | E_{1b}EᵢᵥE₄ | | | E_{f} |
| 985 | E₁ₐ | | E₄* | E_{f} |
| 986 | E_{1b} | | E₄* | E_{f} |
| 987 | E₁ₐEᵢ | | E₄* | E_{f} |
| 988 | E_{1b}Eᵢ | | E₄* | E_{f} |
| 989 | E₁ₐEᵢᵢ | | E₄* | E_{f} |
| 990 | E_{1b}Eᵢᵢ | | E₄* | E_{f} |
| 991 | E₁ₐEᵢᵢE_{iib} | | E₄* | E_{f} |
| 992 | E_{1b}EᵢᵢE_{iib} | | E₄* | E_{f} |
| 993 | E₁ₐE₄ | | E₄* | E_{f} |
| 994 | E_{1b}E₄ | | E₄* | E_{f} |
| 995 | E₁ₐEᵢE₄ | | E₄* | E_{f} |
| 996 | E_{1b}EᵢE₄ | | E₄* | E_{f} |
| 997 | E₁ₐEᵢᵢE₄ | | E₄* | E_{f} |
| 998 | E_{1b}EᵢᵢE₄ | | E₄* | E_{f} |
| 999 | E₁ₐEᵢᵢE_{iib}E₄ | | E₄* | E_{f} |
| 1000 | E_{1b}EᵢᵢE_{iib}E₄ | | E₄* | E_{f} |
| 1001 | E₁ₐEᵢᵢᵢ | | E₄* | E_{f} |
| 1002 | E_{1b}Eᵢᵢᵢ | | E₄* | E_{f} |
| 1003 | E₁ₐEᵢᵢᵢE₄ | | E₄* | E_{f} |
| 1004 | E_{1b}EᵢᵢᵢE₄ | | E₄* | E_{f} |
| 1005 | E₁ₐEᵢᵥ | | E₄* | E_{f} |
| 1006 | E_{1b}Eᵢᵥ | | E₄* | E_{f} |
| 1007 | E₁ₐEᵢᵥE₄ | | E₄* | E_{f} |
| 1008 | E_{1b}EᵢᵥE₄ | | E₄* | E_{f} |
| 1009 | E₁ₐ | | E₅ | E_{f} |
| 1010 | E_{1b} | | E₅ | E_{f} |
| 1011 | E₁ₐEᵢ | | E₅ | E_{f} |
| 1012 | E_{1b}Eᵢ | | E₅ | E_{f} |
| 1013 | E₁ₐEᵢᵢ | | E₅ | E_{f} |
| 1014 | E_{1b}Eᵢᵢ | | E₅ | E_{f} |
| 1015 | E₁ₐEᵢᵢE_{iib} | | E₅ | E_{f} |
| 1016 | E_{1b}EᵢᵢE_{iib} | | E₅ | E_{f} |
| 1017 | E₁ₐE₄ | | E₅ | E_{f} |
| 1018 | E_{1b}E₄ | | E₅ | E_{f} |
| 1019 | E₁ₐEᵢE₄ | | E₅ | E_{f} |
| 1020 | E_{1b}EᵢE₄ | | E₅ | E_{f} |
| 1021 | E₁ₐEᵢᵢE₄ | | E₅ | E_{f} |
| 1022 | E_{1b}EᵢᵢE₄ | | E₅ | E_{f} |
| 1023 | E₁ₐEᵢᵢE_{iib}E₄ | | E₅ | E_{f} |
| 1024 | E_{1b}EᵢᵢE_{iib}E₄ | | E₅ | E_{f} |
| 1025 | E₁ₐEᵢᵢᵢ | | E₅ | E_{f} |
| 1026 | E_{1b}Eᵢᵢᵢ | | E₅ | E_{f} |
| 1027 | E₁ₐEᵢᵢᵢE₄ | | E₅ | E_{f} |
| 1028 | E_{1b}EᵢᵢᵢE₄ | | E₅ | E_{f} |
| 1029 | E₁ₐEᵢᵥ | | E₅ | E_{f} |
| 1030 | E_{1b}Eᵢᵥ | | E₅ | E_{f} |
| 1031 | E₁ₐEᵢᵥE₄ | | E₅ | E_{f} |
| 1032 | E_{1b}EᵢᵥE₄ | | E₅ | E_{f} |
| 1033 | E₁ₐ | | E₄*E₅ | E_{f} |
| 1034 | E_{1b} | | E₄*E₅ | E_{f} |
| 1035 | E₁ₐEᵢ | | E₄*E₅ | E_{f} |
| 1036 | E_{1b}Eᵢ | | E₄*E₅ | E_{f} |
| 1037 | E₁ₐEᵢᵢ | | E₄*E₅ | E_{f} |
| 1038 | E_{1b}Eᵢᵢ | | E₄*E₅ | E_{f} |
| 1039 | E₁ₐEᵢᵢE_{iib} | | E₄*E₅ | E_{f} |
| 1040 | E_{1b}EᵢᵢE_{iib} | | E₄*E₅ | E_{f} |
| 1041 | E₁ₐE₄ | | E₄*E₅ | E_{f} |
| 1042 | E_{1b}E₄ | | E₄*E₅ | E_{f} |
| 1043 | E₁ₐEᵢE₄ | | E₄*E₅ | E_{f} |
| 1044 | E_{1b}EᵢE₄ | | E₄*E₅ | E_{f} |
| 1045 | E₁ₐEᵢᵢE₄ | | E₄*E₅ | E_{f} |
| 1046 | E_{1b}EᵢᵢE₄ | | E₄*E₅ | E_{f} |
| 1047 | E₁ₐEᵢᵢE_{iib}E₄ | | E₄*E₅ | E_{f} |
| 1048 | E_{1b}EᵢᵢE_{iib}E₄ | | E₄*E₅ | E_{f} |
| 1049 | E₁ₐEᵢᵢᵢ | | E₄*E₅ | E_{f} |
| 1050 | E_{1b}Eᵢᵢᵢ | | E₄*E₅ | E_{f} |
| 1051 | E₁ₐEᵢᵢᵢE₄ | | E₄*E₅ | E_{f} |
| 1052 | E_{1b}EᵢᵢᵢE₄ | | E₄*E₅ | E_{f} |
| 1053 | E₁ₐEᵢᵥ | | E₄*E₅ | E_{f} |
| 1054 | E_{1b}Eᵢᵥ | | E₄*E₅ | E_{f} |
| 1055 | E₁ₐEᵢᵥE₄ | | E₄*E₅ | E_{f} |
| 1056 | E_{1b}EᵢᵥE₄ | | E₄*E₅ | E_{f} |
| 1057 | E₁ₐ | AlkL | | E_{f} |
| 1058 | E_{1b} | AlkL | | E_{f} |
| 1059 | E₁ₐEᵢ | AlkL | | E_{f} |
| 1060 | E_{1b}Eᵢ | AlkL | | E_{f} |
| 1061 | E₁ₐEᵢᵢ | AlkL | | E_{f} |
| 1062 | E_{1b}Eᵢᵢ | AlkL | | E_{f} |
| 1063 | E₁ₐEᵢᵢE_{iib} | AlkL | | E_{f} |
| 1064 | E_{1b}EᵢᵢE_{iib} | AlkL | | E_{f} |
| 1065 | E₁ₐE₄ | AlkL | | E_{f} |
| 1066 | E_{1b}E₄ | AlkL | | E_{f} |
| 1067 | E₁ₐEᵢE₄ | AlkL | | E_{f} |
| 1068 | E_{1b}EᵢE₄ | AlkL | | E_{f} |
| 1069 | E₁ₐEᵢᵢE₄ | AlkL | | E_{f} |
| 1070 | E_{1b}EᵢᵢE₄ | AlkL | | E_{f} |
| 1071 | E₁ₐEᵢᵢE_{iib}E₄ | AlkL | | E_{f} |
| 1072 | E_{1b}EᵢᵢE_{iib}E₄ | AlkL | | E_{f} |
| 1073 | E₁ₐEᵢᵢᵢ | AlkL | | E_{f} |
| 1074 | E_{1b}Eᵢᵢᵢ | AlkL | | E_{f} |
| 1075 | E₁ₐEᵢᵢᵢE₄ | AlkL | | E_{f} |
| 1076 | E_{1b}EᵢᵢᵢE₄ | AlkL | | E_{f} |
| 1077 | E₁ₐEᵢᵥ | AlkL | | E_{f} |
| 1078 | E_{1b}Eᵢᵥ | AlkL | | E_{f} |
| 1079 | E₁ₐEᵢᵥE₄ | AlkL | | E_{f} |
| 1080 | E_{1b}EᵢᵥE₄ | AlkL | | E_{f} |
| 1081 | E₁ₐ | AlkL | E₄* | E_{f} |
| 1082 | E_{1b} | AlkL | E₄* | E_{f} |
| 1083 | E₁ₐEᵢ | AlkL | E₄* | E_{f} |
| 1084 | E_{1b}Eᵢ | AlkL | E₄* | E_{f} |
| 1085 | E₁ₐEᵢᵢ | AlkL | E₄* | E_{f} |
| 1086 | E_{1b}Eᵢᵢ | AlkL | E₄* | E_{f} |
| 1087 | E₁ₐEᵢᵢE_{iib} | AlkL | E₄* | E_{f} |
| 1088 | E_{1b}EᵢᵢE_{iib} | AlkL | E₄* | E_{f} |
| 1089 | E₁ₐE₄ | AlkL | E₄* | E_{f} |
| 1090 | E_{1b}E₄ | AlkL | E₄* | E_{f} |
| 1091 | E₁ₐEᵢE₄ | AlkL | E₄* | E_{f} |
| 1092 | E_{1b}EᵢE₄ | AlkL | E₄* | E_{f} |
| 1093 | E₁ₐEᵢᵢE₄ | AlkL | E₄* | E_{f} |
| 1094 | E_{1b}EᵢᵢE₄ | AlkL | E₄* | E_{f} |
| 1095 | E₁ₐEᵢᵢE_{iib}E₄ | AlkL | E₄* | E_{f} |
| 1096 | E_{1b}EᵢᵢE_{iib}E₄ | AlkL | E₄* | E_{f} |
| 1097 | E₁ₐEᵢᵢᵢ | AlkL | E₄* | E_{f} |
| 1098 | E_{1b}Eᵢᵢᵢ | AlkL | E₄* | E_{f} |
| 1099 | E₁ₐEᵢᵢᵢE₄ | AlkL | E₄* | E_{f} |
| 1100 | E_{1b}EᵢᵢᵢE₄ | AlkL | E₄* | E_{f} |
| 1101 | E₁ₐEᵢᵥ | AlkL | E₄* | E_{f} |
| 1102 | E_{1b}Eᵢᵥ | AlkL | E₄* | E_{f} |
| 1103 | E₁ₐEᵢᵥE₄ | AlkL | E₄* | E_{f} |
| 1104 | E_{1b}EᵢᵥE₄ | AlkL | E₄* | E_{f} |
| 1105 | E₁ₐ | AlkL | E₅ | E_{f} |
| 1106 | E_{1b} | AlkL | E₅ | E_{f} |
| 1107 | E₁ₐEᵢ | AlkL | E₅ | E_{f} |
| 1108 | E_{1b}Eᵢ | AlkL | E₅ | E_{f} |
| 1109 | E₁ₐEᵢᵢ | AlkL | E₅ | E_{f} |
| 1110 | E_{1b}Eᵢᵢ | AlkL | E₅ | E_{f} |
| 1111 | E₁ₐEᵢᵢE_{iib} | AlkL | E₅ | E_{f} |
| 1112 | E_{1b}EᵢᵢE_{iib} | AlkL | E₅ | E_{f} |
| 1113 | E₁ₐE₄ | AlkL | E₅ | E_{f} |
| 1114 | E_{1b}E₄ | AlkL | E₅ | E_{f} |
| 1115 | E₁ₐEᵢE₄ | AlkL | E₅ | E_{f} |
| 1116 | E_{1b}EᵢE₄ | AlkL | E₅ | E_{f} |
| 1117 | E₁ₐEᵢᵢE₄ | AlkL | E₅ | E_{f} |
| 1118 | E_{1b}EᵢᵢE₄ | AlkL | E₅ | E_{f} |
| 1119 | E₁ₐEᵢᵢE_{iib}E₄ | AlkL | E₅ | E_{f} |
| 1120 | E_{1b}EᵢᵢE_{iib}E₄ | AlkL | E₅ | E_{f} |
| 1121 | E₁ₐEᵢᵢᵢ | AlkL | E₅ | E_{f} |
| 1122 | E_{1b}Eᵢᵢᵢ | AlkL | E₅ | E_{f} |
| 1123 | E₁ₐEᵢᵢᵢE₄ | AlkL | E₅ | E_{f} |
| 1124 | E_{1b}EᵢᵢᵢE₄ | AlkL | E₅ | E_{f} |
| 1125 | E₁ₐEᵢᵥ | AlkL | E₅ | E_{f} |
| 1126 | E_{1b}Eᵢᵥ | AlkL | E₅ | E_{f} |
| 1127 | E₁ₐEᵢᵥE₄ | AlkL | E₅ | E_{f} |
| 1128 | E_{1b}EᵢᵥE₄ | AlkL | E₅ | E_{f} |
| 1129 | E₁ₐ | AlkL | E₄*E₅ | E_{f} |
| 1130 | E_{1b} | AlkL | E₄*E₅ | E_{f} |
| 1131 | E₁ₐEᵢ | AlkL | E₄*E₅ | E_{f} |
| 1132 | E_{1b}Eᵢ | AlkL | E₄*E₅ | E_{f} |
| 1133 | E₁ₐEᵢᵢ | AlkL | E₄*E₅ | E_{f} |
| 1134 | E_{1b}Eᵢᵢ | AlkL | E₄*E₅ | E_{f} |
| 1135 | E₁ₐEᵢᵢE_{iib} | AlkL | E₄*E₅ | E_{f} |
| 1136 | E_{1b}EᵢᵢE_{iib} | AlkL | E₄*E₅ | E_{f} |
| 1137 | E₁ₐE₄ | AlkL | E₄*E₅ | E_{f} |
| 1138 | E_{1b}E₄ | AlkL | E₄*E₅ | E_{f} |
| 1139 | E₁ₐEᵢE₄ | AlkL | E₄*E₅ | E_{f} |
| 1140 | E_{1b}EᵢE₄ | AlkL | E₄*E₅ | E_{f} |
| 1141 | E₁ₐEᵢᵢE₄ | AlkL | E₄*E₅ | E_{f} |
| 1142 | E_{1b}EᵢᵢE₄ | AlkL | E₄*E₅ | E_{f} |
| 1143 | E₁ₐEᵢᵢE_{iib}E₄ | AlkL | E₄*E₅ | E_{f} |
| 1144 | E_{1b}EᵢᵢE_{iib}E₄ | AlkL | E₄*E₅ | E_{f} |
| 1145 | E₁ₐEᵢᵢᵢ | AlkL | E₄*E₅ | E_{f} |
| 1146 | E_{1b}Eᵢᵢᵢ | AlkL | E₄*E₅ | E_{f} |
| 1147 | E₁ₐEᵢᵢᵢE₄ | AlkL | E₄*E₅ | E_{f} |
| 1148 | E_{1b}EᵢᵢᵢE₄ | AlkL | E₄*E₅ | E_{f} |
| 1149 | E₁ₐEᵢᵥ | AlkL | E₄*E₅ | E_{f} |
| 1150 | E_{1b}Eᵢᵥ | AlkL | E₄*E₅ | E_{f} |
| 1151 | E₁ₐEᵢᵥE₄ | AlkL | E₄*E₅ | E_{f} |
| 1152 | E_{1b}EᵢᵥE₄ | AlkL | E₄*E₅ | E_{f} |

[0192] Microorganisms quite especially preferred according to the invention (abbreviated as MO) are outstandingly suitable for the production of ω-hydroxycarboxylate esters or ω-oxocarboxylate esters and have increased or decreased enzyme activities (abbreviated as E) described in the following table, where these can in addition advantageously be combined with an increased enzyme activity compared to the wild type of the microorganism, which is described for the 3-ketoacyl-ACP (Acyl Carrrier Protein) synthase III (EC 2.3.1.41), in particular that from plants, preferably that from plants the seeds whereof contain fatty acids with alkyl residues shorter than 14 C atoms, and particularly preferably that from plants of the genera Cuphea, Elaeis, Cocos, Umbellularia and Cinnamomum and gene products selected from AccA, AccB, AccC, AccD, AceE, AceF, Lpd, AcpP, FabA, FabB, FabD, FabF, FabG, FabH, FabI, FabZ, PanD, PanK, UdhA, PntA or PntB.

[0193] Any combinations of at least two of these enzyme activities can advantageously be increased.

[0194] In addition, moreover, it can be advantageous if the microorganism is provided with a lower enzyme activity compared to the wild type of the microorganism, which is described for the gene products selected from TdcE, PflA, PflB, PflC, PflD, PoxB, YgfG, AckA, AckB, TdcD, Pta, LdhA, AdhE, MgsA, FdnG, FdnH, FdnI, FdhF, FdoG, FdoH, FdoI, PrpC, PrpD, PrpF, PrpB, TdcD, Pdc, PorA, PorB, PorC, PorD, AlsS, IlvB, IlvM, IlvN, IlvG, IlyI, IlvH, AlsD, ButB, Thl, ThlA, ThlB, PhaA, PhaB, Crt, BdhA, BdhB, Adc, Adh, CtfB, AtoA, AtoD, LdhL, GltA, FabR, FhuA, Dld, LldA or LldP, singly or in any combination.

| | | |
|---|---|---|
| MO | E increased | E decreased |

| | | | | |
|---|---|---|---|---|
| 1 | E₁ₐ | EᵥEᵥᵢ | | |
| 2 | E_{1b} | EᵥEᵥᵢ | | |
| 3 | E₁ₐEᵢ | EᵥEᵥᵢ | | |
| 4 | E_{1b}Eᵢ | EᵥEᵥᵢ | | |
| 5 | E₁ₐEᵢᵢ | EᵥEᵥᵢ | | |
| 6 | E_{1b}Eᵢᵢ | EᵥEᵥᵢ | | |
| 7 | E₁ₐEᵢᵢE_{iib} | EᵥEᵥᵢ | | |
| 8 | E_{1b}EᵢᵢE_{iib} | EᵥEᵥᵢ | | |
| 9 | E₁ₐE₄ | EᵥEᵥᵢ | | |
| 10 | E_{1b}E₄ | EᵥEᵥᵢ | | |
| 11 | E₁ₐEᵢE₄ | EᵥEᵥᵢ | | |
| 12 | E_{1b}EᵢE₄ | EᵥEᵥᵢ | | |
| 13 | E₁ₐEᵢᵢE₄ | EᵥEᵥᵢ | | |
| 14 | E_{1b}EᵢᵢE₄ | EᵥEᵥᵢ | | |
| 15 | E₁ₐEᵢᵢE_{iib}E₄ | EᵥEᵥᵢ | | |
| 16 | E_{1b}EᵢᵢE_{iib}E₄ | EᵥEᵥᵢ | | |
| 17 | E₁ₐEᵢᵢᵢ | EᵥEᵥᵢ | | |
| 18 | E_{1b}Eᵢᵢᵢ | EᵥEᵥᵢ | | |
| 19 | E₁ₐEᵢᵢᵢE₄ | EᵥEᵥᵢ | | |
| 20 | E_{1b}EᵢᵢᵢE₄ | EᵥEᵥᵢ | | |
| 21 | E₁ₐEᵢᵥ | EᵥEᵥᵢ | | |
| 22 | E_{1b}Eᵢᵥ | EᵥEᵥᵢ | | |
| 23 | E₁ₐEᵢᵥE₄ | EᵥEᵥᵢ | | |
| 24 | E_{1b}EᵢᵥE₄ | EᵥEᵥᵢ | | |
| 25 | E₁ₐ | EᵥEᵥᵢ | E₄* | |
| 26 | E_{1b} | EᵥEᵥᵢ | E₄* | |
| 27 | E₁ₐEᵢ | EᵥEᵥᵢ | E₄* | |
| 28 | E_{1b}Eᵢ | EᵥEᵥᵢ | E₄* | |
| 29 | E₁ₐEᵢᵢ | EᵥEᵥᵢ | E₄* | |
| 30 | E_{1b}Eᵢᵢ | EᵥEᵥᵢ | E₄* | |
| 31 | E₁ₐEᵢᵢE_{iib} | EᵥEᵥᵢ | E₄* | |
| 32 | E_{1b}EᵢᵢE_{iib} | EᵥEᵥᵢ | E₄* | |
| 33 | E₁ₐE₄ | EᵥEᵥᵢ | E₄* | |
| 34 | E_{1b}E₄ | EᵥEᵥᵢ | E₄* | |
| 35 | E₁ₐEᵢE₄ | EᵥEᵥᵢ | E₄* | |
| 36 | E_{1b}EᵢE₄ | EᵥEᵥᵢ | E₄* | |
| 37 | E₁ₐEᵢᵢE₄ | EᵥEᵥᵢ | E₄* | |
| 38 | E_{1b}EᵢᵢE₄ | EᵥEᵥᵢ | E₄* | |
| 39 | E₁ₐEᵢᵢE_{iib}E₄ | EᵥEᵥᵢ | E₄* | |
| 40 | E_{1b}EᵢᵢE_{iib}E₄ | EᵥEᵥᵢ | E₄* | |
| 41 | E₁ₐEᵢᵢᵢ | EᵥEᵥᵢ | E₄* | |
| 42 | E_{1b}Eᵢᵢᵢ | EᵥEᵥᵢ | E₄* | |
| 43 | E₁ₐEᵢᵢᵢE₄ | EᵥEᵥᵢ | E₄* | |
| 44 | E_{1b}EᵢᵢᵢE₄ | EᵥEᵥᵢ | E₄* | |
| 45 | E₁ₐEᵢᵥ | EᵥEᵥᵢ | E₄* | |
| 46 | E_{1b}Eᵢᵥ | EᵥEᵥᵢ | E₄* | |
| 47 | E₁ₐEᵢᵥE₄ | EᵥEᵥᵢ | E₄* | |
| 48 | E_{1b}EᵢᵥE₄ | EᵥEᵥᵢ | E₄* | |
| 49 | E₁ₐ | EᵥEᵥᵢ | E₅ | |
| 50 | E_{1b} | EᵥEᵥᵢ | E₅ | |
| 51 | E₁ₐEᵢ | EᵥEᵥᵢ | E₅ | |
| 52 | E_{1b}Eᵢ | EᵥEᵥᵢ | E₅ | |
| 53 | E₁ₐEᵢᵢ | EᵥEᵥᵢ | E₅ | |
| 54 | E_{1b}Eᵢᵢ | EᵥEᵥᵢ | E₅ | |
| 55 | E₁ₐEᵢᵢE_{iib} | EᵥEᵥᵢ | E₅ | |
| 56 | E_{1b}EᵢᵢE_{iib} | EᵥEᵥᵢ | E₅ | |
| 57 | E₁ₐE₄ | EᵥEᵥᵢ | E₅ | |
| 58 | E_{1b}E₄ | EᵥEᵥᵢ | E₅ | |
| 59 | E₁ₐEᵢE₄ | EᵥEᵥᵢ | E₅ | |
| 60 | E_{1b}EᵢE₄ | EᵥEᵥᵢ | E₅ | |
| 61 | E₁ₐEᵢᵢE₄ | EᵥEᵥᵢ | E₅ | |
| 62 | E_{1b}EᵢᵢE₄ | EᵥEᵥᵢ | E₅ | |
| 63 | E₁ₐEᵢᵢE_{iib}E₄ | EᵥEᵥᵢ | E₅ | |
| 64 | E_{1b}EᵢᵢE_{iib}E₄ | EᵥEᵥᵢ | E₅ | |
| 65 | E₁ₐEᵢᵢᵢ | EᵥEᵥᵢ | E₅ | |
| 66 | E_{1b}Eᵢᵢᵢ | EᵥEᵥᵢ | E₅ | |
| 67 | E₁ₐEᵢᵢᵢE₄ | EᵥEᵥᵢ | E₅ | |
| 68 | E_{1b}EᵢᵢᵢE₄ | EᵥEᵥᵢ | E₅ | |
| 69 | E₁ₐEᵢᵥ | EᵥEᵥᵢ | E₅ | |
| 70 | E_{1b}Eᵢᵥ | EᵥEᵥᵢ | E₅ | |
| 71 | E₁ₐEᵢᵥE₄ | EᵥEᵥᵢ | E₅ | |
| 72 | E_{1b}EᵢᵥE₄ | EᵥEᵥᵢ | E₅ | |
| 73 | E₁ₐ | EᵥEᵥᵢ | E₄*E₅ | |
| 74 | E_{1b} | EᵥEᵥᵢ | E₄*E₅ | |
| 75 | E₁ₐEᵢ | EᵥEᵥᵢ | E₄*E₅ | |
| 76 | E_{1b}Eᵢ | EᵥEᵥᵢ | E₄*E₅ | |
| 77 | E₁ₐEᵢᵢ | EᵥEᵥᵢ | E₄*E₅ | |
| 78 | E_{1b}Eᵢᵢ | EᵥEᵥᵢ | E₄*E₅ | |
| 79 | E₁ₐEᵢᵢE_{iib} | EᵥEᵥᵢ | E₄*E₅ | |
| 80 | E_{1b}EᵢᵢE_{iib} | EᵥEᵥᵢ | E₄*E₅ | |
| 81 | E₁ₐE₄ | EᵥEᵥᵢ | E₄*E₅ | |
| 82 | E_{1b}E₄ | EᵥEᵥᵢ | E₄*E₅ | |
| 83 | E₁ₐEᵢE₄ | EᵥEᵥᵢ | E₄*E₅ | |
| 84 | E_{1b}EᵢE₄ | EᵥEᵥᵢ | E₄*E₅ | |
| 85 | E₁ₐEᵢᵢE₄ | EᵥEᵥᵢ | E₄*E₅ | |
| 86 | E_{1b}EᵢᵢE₄ | EᵥEᵥᵢ | E₄*E₅ | |
| 87 | E₁ₐEᵢᵢE_{iib}E₄ | EᵥEᵥᵢ | E₄*E₅ | |
| 88 | E_{1b}EᵢᵢE_{iib}E₄ | EᵥEᵥᵢ | E₄*E₅ | |
| 89 | E₁ₐEᵢᵢᵢ | EᵥEᵥᵢ | E₄*E₅ | |
| 90 | E_{1b}Eᵢᵢᵢ | EᵥEᵥᵢ | E₄*E₅ | |
| 91 | E₁ₐEᵢᵢᵢE₄ | EᵥEᵥᵢ | E₄*E₅ | |
| 92 | E_{1b}EᵢᵢᵢE₄ | EᵥEᵥᵢ | E₄*E₅ | |
| 93 | E₁ₐEᵢᵥ | EᵥEᵥᵢ | E₄*E₅ | |
| 94 | E_{1b}Eᵢᵥ | EᵥEᵥᵢ | E₄*E₅ | |
| 95 | E₁ₐEᵢᵥE₄ | EᵥEᵥᵢ | E₄*E₅ | |
| 96 | E_{1b}EᵢᵥE₄ | EᵥEᵥᵢ | E₄*E₅ | |
| 97 | E₁ₐ | AlkLEᵥEᵥᵢ | | |
| 98 | E_{1b} | AlkLEᵥEᵥᵢ | | |
| 99 | E₁ₐEᵢ | AlkLEᵥEᵥᵢ | | |
| 100 | E_{1b}Eᵢ | AlkLEᵥEᵥᵢ | | |
| 101 | E₁ₐEᵢᵢ | AlkLEᵥEᵥᵢ | | |
| 102 | E_{1b}Eᵢᵢ | AlkLEᵥEᵥᵢ | | |
| 103 | E₁ₐEᵢᵢE_{iib} | AlkLEᵥEᵥᵢ | | |
| 104 | E_{1b}EᵢᵢE_{iib} | AlkLEᵥEᵥᵢ | | |
| 105 | E₁ₐE₄ | AlkLEᵥEᵥᵢ | | |
| 106 | E_{1b}E₄ | AlkLEᵥEᵥᵢ | | |
| 107 | E₁ₐEᵢE₄ | AlkLEᵥEᵥᵢ | | |
| 108 | E_{1b}EᵢE₄ | AlkLEᵥEᵥᵢ | | |
| 109 | E₁ₐEᵢᵢE₄ | AlkLEᵥEᵥᵢ | | |
| 110 | E_{1b}EᵢᵢE₄ | AlkLEᵥEᵥᵢ | | |
| 111 | E₁ₐEᵢᵢE_{iib}E₄ | AlkLEᵥEᵥᵢ | | |
| 112 | E_{1b}EᵢᵢE_{iib}E₄ | AlkLEᵥEᵥᵢ | | |
| 113 | E₁ₐEᵢᵢᵢ | AlkLEᵥEᵥᵢ | | |
| 114 | E_{1b}Eᵢᵢᵢ | AlkLEᵥEᵥᵢ | | |
| 115 | E₁ₐEᵢᵢᵢE₄ | AlkLEᵥEᵥᵢ | | |
| 116 | E_{1b}EᵢᵢᵢE₄ | AlkLEᵥEᵥᵢ | | |
| 117 | E₁ₐEᵢᵥ | AlkLEᵥEᵥᵢ | | |
| 118 | E_{1b}Eᵢᵥ | AlkLEᵥEᵥᵢ | | |
| 119 | E₁ₐEᵢᵥE₄ | AlkLEᵥEᵥᵢ | | |
| 120 | E_{1b}EᵢᵥE₄ | AlkLEᵥEᵥᵢ | | |
| 121 | E₁ₐ | AlkLEᵥEᵥᵢ | E₄* | |
| 122 | E_{1b} | AlkLEᵥEᵥᵢ | E₄* | |
| 123 | E₁ₐEᵢ | AlkLEᵥEᵥᵢ | E₄* | |
| 124 | E_{1b}Eᵢ | AlkLEᵥEᵥᵢ | E₄* | |
| 125 | E₁ₐEᵢᵢ | AlkLEᵥEᵥᵢ | E₄* | |
| 126 | E_{1b}Eᵢᵢ | AlkLEᵥEᵥᵢ | E₄* | |
| 127 | E₁ₐEᵢᵢE_{iib} | AlkLEᵥEᵥᵢ | E₄* | |
| 128 | E_{1b}EᵢᵢE_{iib} | AlkLEᵥEᵥᵢ | E₄* | |
| 129 | E₁ₐE₄ | AlkLEᵥEᵥᵢ | E₄* | |
| 130 | E_{1b}E₄ | AlkLEᵥEᵥᵢ | E₄* | |
| 131 | E₁ₐEᵢE₄ | AlkLEᵥEᵥᵢ | E₄* | |
| 132 | E_{1b}EᵢE₄ | AlkLEᵥEᵥᵢ | E₄* | |
| 133 | E₁ₐEᵢᵢE₄ | AlkLEᵥEᵥᵢ | E₄* | |
| 134 | E_{1b}EᵢᵢE₄ | AlkLEᵥEᵥᵢ | E₄* | |
| 135 | E₁ₐEᵢᵢE_{iib}E₄ | AlkLEᵥEᵥᵢ | E₄* | |
| 136 | E_{1b}EᵢᵢE_{iib}E₄ | AlkLEᵥEᵥᵢ | E₄* | |
| 137 | E₁ₐEᵢᵢᵢ | AlkLEᵥEᵥᵢ | E₄* | |
| 138 | E_{1b}Eᵢᵢᵢ | AlkLEᵥEᵥᵢ | E₄* | |
| 139 | E₁ₐEᵢᵢᵢE₄ | AlkLEᵥEᵥᵢ | E₄* | |
| 140 | E_{1b}EᵢᵢᵢE₄ | AlkLEᵥEᵥᵢ | E₄* | |
| 141 | E₁ₐEᵢᵥ | AlkLEᵥEᵥᵢ | E₄* | |
| 142 | E_{1b}Eᵢᵥ | AlkLEᵥEᵥᵢ | E₄* | |
| 143 | E₁ₐEᵢᵥE₄ | AlkLEᵥEᵥᵢ | E₄* | |
| 144 | E_{1b}EᵢᵥE₄ | AlkLEᵥEᵥᵢ | E₄* | |
| 145 | E₁ₐ | AlkLEᵥEᵥᵢ | E₅ | |
| 146 | E_{1b} | AlkLEᵥEᵥᵢ | E₅ | |
| 147 | E₁ₐEᵢ | AlkLEᵥEᵥᵢ | E₅ | |
| 148 | E_{1b}Eᵢ | AlkLEᵥEᵥᵢ | E₅ | |
| 149 | E₁ₐEᵢᵢ | AlkLEᵥEᵥᵢ | E₅ | |
| 150 | E_{1b}Eᵢᵢ | AlkLEᵥEᵥᵢ | E₅ | |
| 151 | E₁ₐEᵢᵢE_{iib} | AlkLEᵥEᵥᵢ | E₅ | |
| 152 | E_{1b}EᵢᵢE_{iib} | AlkLEᵥEᵥᵢ | E₅ | |
| 153 | E₁ₐE₄ | AlkLEᵥEᵥᵢ | E₅ | |
| 154 | E_{1b}E₄ | AlkLEᵥEᵥᵢ | E₅ | |
| 155 | E₁ₐEᵢE₄ | AlkLEᵥEᵥᵢ | E₅ | |
| 156 | E_{1b}EᵢE₄ | AlkLEᵥEᵥᵢ | E₅ | |
| 157 | E₁ₐEᵢᵢE₄ | AlkLEᵥEᵥᵢ | E₅ | |
| 158 | E_{1b}EᵢᵢE₄ | AlkLEᵥEᵥᵢ | E₅ | |
| 159 | E₁ₐEᵢᵢE_{iib}E₄ | AlkLEᵥEᵥᵢ | E₅ | |
| 160 | E_{1b}EᵢᵢE_{iib}E₄ | AlkLEᵥEᵥᵢ | E₅ | |
| 161 | E₁ₐEᵢᵢᵢ | AlkLEᵥEᵥᵢ | E₅ | |
| 162 | E_{1b}Eᵢᵢᵢ | AlkLEᵥEᵥᵢ | E₅ | |
| 163 | E₁ₐEᵢᵢᵢE₄ | AlkLEᵥEᵥᵢ | E₅ | |
| 164 | E_{1b}EᵢᵢᵢE₄ | AlkLEᵥEᵥᵢ | E₅ | |
| 165 | E₁ₐEᵢᵥ | AlkLEᵥEᵥᵢ | E₅ | |
| 166 | E_{1b}Eᵢᵥ | AlkLEᵥEᵥᵢ | E₅ | |
| 167 | E₁ₐEᵢᵥE₄ | AlkLEᵥEᵥᵢ | E₅ | |
| 168 | E_{1b}EᵢᵥE₄ | AlkLEᵥEᵥᵢ | E₅ | |
| 169 | E₁ₐ | AlkLEᵥEᵥᵢ | E₄*E₅ | |
| 170 | E_{1b} | AlkLEᵥEᵥᵢ | E₄*E₅ | |
| 171 | E₁ₐEᵢ | AlkLEᵥEᵥᵢ | E₄*E₅ | |
| 172 | E_{1b}Eᵢ | AlkLEᵥEᵥᵢ | E₄*E₅ | |
| 173 | E₁ₐEᵢᵢ | AlkLEᵥEᵥᵢ | E₄*E₅ | |
| 174 | E_{1b}Eᵢᵢ | AlkLEᵥEᵥᵢ | E₄*E₅ | |
| 175 | E₁ₐEᵢᵢE_{iib} | AlkLEᵥEᵥᵢ | E₄*E₅ | |
| 176 | E_{1b}EᵢᵢE_{iib} | AlkLEᵥEᵥᵢ | E₄*E₅ | |
| 177 | E₁ₐE₄ | AlkLEᵥEᵥᵢ | E₄*E₅ | |
| 178 | E_{1b}E₄ | AlkLEᵥEᵥᵢ | E₄*E₅ | |
| 179 | E₁ₐEᵢE₄ | AlkLEᵥEᵥᵢ | E₄*E₅ | |
| 180 | E_{1b}EᵢE₄ | AlkLEᵥEᵥᵢ | E₄*E₅ | |
| 181 | E₁ₐEᵢᵢE₄ | AlkLEᵥEᵥᵢ | E₄*E₅ | |
| 182 | E_{1b}EᵢᵢE₄ | AlkLEᵥEᵥᵢ | E₄*E₅ | |
| 183 | E₁ₐEᵢᵢE_{iib}E₄ | AlkLEᵥEᵥᵢ | E₄*E₅ | |
| 184 | E_{1b}EᵢᵢE_{iib}E₄ | AlkLEᵥEᵥᵢ | E₄*E₅ | |
| 185 | E₁ₐEᵢᵢᵢ | AlkLEᵥEᵥᵢ | E₄*E₅ | |
| 186 | E_{1b}Eᵢᵢᵢ | AlkLEᵥEᵥᵢ | E₄*E₅ | |
| 187 | E₁ₐEᵢᵢᵢE₄ | AlkLEᵥEᵥᵢ | E₄*E₅ | |
| 188 | E_{1b}EᵢᵢᵢE₄ | AlkLEᵥEᵥᵢ | E₄*E₅ | |
| 189 | E₁ₐEᵢᵥ | AlkLEᵥEᵥᵢ | E₄*E₅ | |
| 190 | E_{1b}Eᵢᵥ | AlkLEᵥEᵥᵢ | E₄*E₅ | |
| 191 | E₁ₐEᵢᵥE₄ | AlkLEᵥEᵥᵢ | E₄*E₅ | |
| 192 | E_{1b}EᵢᵥE₄ | AlkLEᵥEᵥᵢ | E₄*E₅ | |
| 193 | E₁ₐ | EᵥEᵥᵢ | | Eₐ |
| 194 | E_{1b} | EᵥEᵥᵢ | | Eₐ |
| 195 | E₁ₐEᵢ | EᵥEᵥᵢ | | Eₐ |
| 196 | E_{1b}Eᵢ | EᵥEᵥᵢ | | Eₐ |
| 197 | E₁ₐEᵢᵢ | EᵥEᵥᵢ | | Eₐ |
| 198 | E_{1b}Eᵢᵢ | EᵥEᵥᵢ | | Eₐ |
| 199 | E₁ₐEᵢᵢE_{iib} | EᵥEᵥᵢ | | Eₐ |
| 200 | E_{1b}EᵢᵢE_{iib} | EᵥEᵥᵢ | | Eₐ |
| 201 | E₁ₐE₄ | EᵥEᵥᵢ | | Eₐ |
| 202 | E_{1b}E₄ | EᵥEᵥᵢ | | Eₐ |
| 203 | E₁ₐEᵢE₄ | EᵥEᵥᵢ | | Eₐ |
| 204 | E_{1b}EᵢE₄ | EᵥEᵥᵢ | | Eₐ |
| 205 | E₁ₐEᵢᵢE₄ | EᵥEᵥᵢ | | Eₐ |
| 206 | E_{1b}EᵢᵢE₄ | EᵥEᵥᵢ | | Eₐ |
| 207 | E₁ₐEᵢᵢE_{iib}E₄ | EᵥEᵥᵢ | | Eₐ |
| 208 | E_{1b}EᵢᵢE_{iib}E₄ | EᵥEᵥᵢ | | Eₐ |
| 209 | E₁ₐEᵢᵢᵢ | EᵥEᵥᵢ | | Eₐ |
| 210 | E_{1b}Eᵢᵢᵢ | EᵥEᵥᵢ | | Eₐ |
| 211 | E₁ₐEᵢᵢᵢE₄ | EᵥEᵥᵢ | | Eₐ |
| 212 | E_{1b}EᵢᵢᵢE₄ | EᵥEᵥᵢ | | Eₐ |
| 213 | E₁ₐEᵢᵥ | EᵥEᵥᵢ | | Eₐ |
| 214 | E_{1b}Eᵢᵥ | EᵥEᵥᵢ | | Eₐ |
| 215 | E₁ₐEᵢᵥE₄ | EᵥEᵥᵢ | | Eₐ |
| 216 | E_{1b}EᵢᵥE₄ | EᵥEᵥᵢ | | Eₐ |
| 217 | E₁ₐ | EᵥEᵥᵢ | E₄* | Eₐ |
| 218 | E_{1b} | EᵥEᵥᵢ | E₄* | Eₐ |
| 219 | E₁ₐEᵢ | EᵥEᵥᵢ | E₄* | Eₐ |
| 220 | E_{1b}Eᵢ | EᵥEᵥᵢ | E₄* | Eₐ |
| 221 | E₁ₐEᵢᵢ | EᵥEᵥᵢ | E₄* | Eₐ |
| 222 | E_{1b}Eᵢᵢ | EᵥEᵥᵢ | E₄* | Eₐ |
| 223 | E₁ₐEᵢᵢE_{iib} | EᵥEᵥᵢ | E₄* | Eₐ |
| 224 | E_{1b}EᵢᵢE_{iib} | EᵥEᵥᵢ | E₄* | Eₐ |
| 225 | E₁ₐE₄ | EᵥEᵥᵢ | E₄* | Eₐ |
| 226 | E_{1b}E₄ | EᵥEᵥᵢ | E₄* | Eₐ |
| 227 | E₁ₐEᵢE₄ | EᵥEᵥᵢ | E₄* | Eₐ |
| 228 | E_{1b}EᵢE₄ | EᵥEᵥᵢ | E₄* | Eₐ |
| 229 | E₁ₐEᵢᵢE₄ | EᵥEᵥᵢ | E₄* | Eₐ |
| 230 | E_{1b}EᵢᵢE₄ | EᵥEᵥᵢ | E₄* | Eₐ |
| 231 | E₁ₐEᵢᵢE_{iib}E₄ | EᵥEᵥᵢ | E₄* | Eₐ |
| 232 | E_{1b}EᵢᵢE_{iib}E₄ | EᵥEᵥᵢ | E₄* | Eₐ |
| 233 | E₁ₐEᵢᵢᵢ | EᵥEᵥᵢ | E₄* | Eₐ |
| 234 | E_{1b}Eᵢᵢᵢ | EᵥEᵥᵢ | E₄* | Eₐ |
| 235 | E₁ₐEᵢᵢᵢE₄ | EᵥEᵥᵢ | E₄* | Eₐ |
| 236 | E_{1b}EᵢᵢᵢE₄ | EᵥEᵥᵢ | E₄* | Eₐ |
| 237 | E₁ₐEᵢᵥ | EᵥEᵥᵢ | E₄* | Eₐ |
| 238 | E_{1b}Eᵢᵥ | EᵥEᵥᵢ | E₄* | Eₐ |
| 239 | E₁ₐEᵢᵥE₄ | EᵥEᵥᵢ | E₄* | Eₐ |
| 240 | E_{1b}EᵢᵥE₄ | EᵥEᵥᵢ | E₄* | Eₐ |
| 241 | E₁ₐ | EᵥEᵥᵢ | E₅ | Eₐ |
| 242 | E_{1b} | EᵥEᵥᵢ | E₅ | Eₐ |
| 243 | E₁ₐEᵢ | EᵥEᵥᵢ | E₅ | Eₐ |
| 244 | E_{1b}Eᵢ | EᵥEᵥᵢ | E₅ | Eₐ |
| 245 | E₁ₐEᵢᵢ | EᵥEᵥᵢ | E₅ | Eₐ |
| 246 | E_{1b}Eᵢᵢ | EᵥEᵥᵢ | E₅ | Eₐ |
| 247 | E₁ₐEᵢᵢE_{iib} | EᵥEᵥᵢ | E₅ | Eₐ |
| 248 | E_{1b}EᵢᵢE_{iib} | EᵥEᵥᵢ | E₅ | Eₐ |
| 249 | E₁ₐE₄ | EᵥEᵥᵢ | E₅ | Eₐ |
| 250 | E_{1b}E₄ | EᵥEᵥᵢ | E₅ | Eₐ |
| 251 | E₁ₐEᵢE₄ | EᵥEᵥᵢ | E₅ | Eₐ |
| 252 | E_{1b}EᵢE₄ | EᵥEᵥᵢ | E₅ | Eₐ |
| 253 | E₁ₐEᵢᵢE₄ | EᵥEᵥᵢ | E₅ | Eₐ |
| 254 | E_{1b}EᵢᵢE₄ | EᵥEᵥᵢ | E₅ | Eₐ |
| 255 | E₁ₐEᵢᵢE_{iib}E₄ | EᵥEᵥᵢ | E₅ | Eₐ |
| 256 | E_{1b}EᵢᵢE_{iib}E₄ | EᵥEᵥᵢ | E₅ | Eₐ |
| 257 | E₁ₐEᵢᵢᵢ | EᵥEᵥᵢ | E₅ | Eₐ |
| 258 | E_{1b}Eᵢᵢᵢ | EᵥEᵥᵢ | E₅ | Eₐ |
| 259 | E₁ₐEᵢᵢᵢE₄ | EᵥEᵥᵢ | E₅ | Eₐ |
| 260 | E_{1b}EᵢᵢᵢE₄ | EᵥEᵥᵢ | E₅ | Eₐ |
| 261 | E₁ₐEᵢᵥ | EᵥEᵥᵢ | E₅ | Eₐ |
| 262 | E_{1b}Eᵢᵥ | EᵥEᵥᵢ | E₅ | Eₐ |
| 263 | E₁ₐEᵢᵥE₄ | EᵥEᵥᵢ | E₅ | Eₐ |
| 264 | E_{1b}EᵢᵥE₄ | EᵥEᵥᵢ | E₅ | Eₐ |
| 265 | E₁ₐ | EᵥEᵥᵢ | E₄*E₅ | Eₐ |
| 266 | E_{1b} | EᵥEᵥᵢ | E₄*E₅ | Eₐ |
| 267 | E₁ₐEᵢ | EᵥEᵥᵢ | E₄*E₅ | Eₐ |
| 268 | E_{1b}Eᵢ | EᵥEᵥᵢ | E₄*E₅ | Eₐ |
| 269 | E₁ₐEᵢᵢ | EᵥEᵥᵢ | E₄*E₅ | Eₐ |
| 270 | E_{1b}Eᵢᵢ | EᵥEᵥᵢ | E₄*E₅ | Eₐ |
| 271 | E₁ₐEᵢᵢE_{iib} | EᵥEᵥᵢ | E₄*E₅ | Eₐ |
| 272 | E_{1b}EᵢᵢE_{iib} | EᵥEᵥᵢ | E₄*E₅ | Eₐ |
| 273 | E₁ₐE₄ | EᵥEᵥᵢ | E₄*E₅ | Eₐ |
| 274 | E_{1b}E₄ | EᵥEᵥᵢ | E₄*E₅ | Eₐ |
| 275 | E₁ₐEᵢE₄ | EᵥEᵥᵢ | E₄*E₅ | Eₐ |
| 276 | E_{1b}EᵢE₄ | EᵥEᵥᵢ | E₄*E₅ | Eₐ |
| 277 | E₁ₐEᵢᵢE₄ | EᵥEᵥᵢ | E₄*E₅ | Eₐ |
| 278 | E_{1b}EᵢᵢE₄ | EᵥEᵥᵢ | E₄*E₅ | Eₐ |
| 279 | E₁ₐEᵢᵢE_{iib}E₄ | EᵥEᵥᵢ | E₄*E₅ | Eₐ |
| 280 | E_{1b}EᵢᵢE_{iib}E₄ | EᵥEᵥᵢ | E₄*E₅ | Eₐ |
| 281 | E₁ₐEᵢᵢᵢ | EᵥEᵥᵢ | E₄*E₅ | Eₐ |
| 282 | E_{1b}Eᵢᵢᵢ | EᵥEᵥᵢ | E₄*E₅ | Eₐ |
| 283 | E₁ₐEᵢᵢᵢE₄ | EᵥEᵥᵢ | E₄*E₅ | Eₐ |
| 284 | E_{1b}EᵢᵢᵢE₄ | EᵥEᵥᵢ | E₄*E₅ | Eₐ |
| 285 | E₁ₐEᵢᵥ | EᵥEᵥᵢ | E₄*E₅ | Eₐ |
| 286 | E_{1b}Eᵢᵥ | EᵥEᵥᵢ | E₄*E₅ | Eₐ |
| 287 | E₁ₐEᵢᵥE₄ | EᵥEᵥᵢ | E₄*E₅ | Eₐ |
| 288 | E_{1b}EᵢᵥE₄ | EᵥEᵥᵢ | E₄*E₅ | Eₐ |
| 289 | E₁ₐ | AlkLEᵥEᵥᵢ | | Eₐ |
| 290 | E_{1b} | AlkLEᵥEᵥᵢ | | Eₐ |
| 291 | E₁ₐEᵢ | AlkLEᵥEᵥᵢ | | Eₐ |
| 292 | E_{1b}Eᵢ | AlkLEᵥEᵥᵢ | | Eₐ |
| 293 | E₁ₐEᵢᵢ | AlkLEᵥEᵥᵢ | | Eₐ |
| 294 | E_{1b}Eᵢᵢ | AlkLEᵥEᵥᵢ | | Eₐ |
| 295 | E₁ₐEᵢᵢE_{iib} | AlkLEᵥEᵥᵢ | | Eₐ |
| 296 | E_{1b}EᵢᵢE_{iib} | AlkLEᵥEᵥᵢ | | Eₐ |
| 297 | E₁ₐE₄ | AlkLEᵥEᵥᵢ | | Eₐ |
| 298 | E_{1b}E₄ | AlkLEᵥEᵥᵢ | | Eₐ |
| 299 | E₁ₐEᵢE₄ | AlkLEᵥEᵥᵢ | | Eₐ |
| 300 | E_{1b}EᵢE₄ | AlkLEᵥEᵥᵢ | | Eₐ |
| 301 | E₁ₐEᵢᵢE₄ | AlkLEᵥEᵥᵢ | | Eₐ |
| 302 | E_{1b}EᵢᵢE₄ | AlkLEᵥEᵥᵢ | | Eₐ |
| 303 | E₁ₐEᵢᵢE_{iib}E₄ | AlkLEᵥEᵥᵢ | | Eₐ |
| 304 | E_{1b}EᵢᵢE_{iib}E₄ | AlkLEᵥEᵥᵢ | | Eₐ |
| 305 | E₁ₐEᵢᵢᵢ | AlkLEᵥEᵥᵢ | | Eₐ |
| 306 | E_{1b}Eᵢᵢᵢ | AlkLEᵥEᵥᵢ | | Eₐ |
| 307 | E₁ₐEᵢᵢᵢE₄ | AlkLEᵥEᵥᵢ | | Eₐ |
| 308 | E_{1b}EᵢᵢᵢE₄ | AlkLEᵥEᵥᵢ | | Eₐ |
| 309 | E₁ₐEᵢᵥ | AlkLEᵥEᵥᵢ | | Eₐ |
| 310 | E_{1b}Eᵢᵥ | AlkLEᵥEᵥᵢ | | Eₐ |
| 311 | E₁ₐEᵢᵥE₄ | AlkLEᵥEᵥᵢ | | Eₐ |
| 312 | E_{1b}EᵢᵥE₄ | AlkLEᵥEᵥᵢ | | Eₐ |
| 313 | E₁ₐ | AlkLEᵥEᵥᵢ | E₄* | Eₐ |
| 314 | E_{1b} | AlkLEᵥEᵥᵢ | E₄* | Eₐ |
| 315 | E₁ₐEᵢ | AlkLEᵥEᵥᵢ | E₄* | Eₐ |
| 316 | E_{1b}Eᵢ | AlkLEᵥEᵥᵢ | E₄* | Eₐ |
| 317 | E₁ₐEᵢᵢ | AlkLEᵥEᵥᵢ | E₄* | Eₐ |
| 318 | E_{1b}Eᵢᵢ | AlkLEᵥEᵥᵢ | E₄* | Eₐ |
| 319 | E₁ₐEᵢᵢE_{iib} | AlkLEᵥEᵥᵢ | E₄* | Eₐ |
| 320 | E_{1b}EᵢᵢE_{iib} | AlkLEᵥEᵥᵢ | E₄* | Eₐ |
| 321 | E₁ₐE₄ | AlkLEᵥEᵥᵢ | E₄* | Eₐ |
| 322 | E_{1b}E₄ | AlkLEᵥEᵥᵢ | E₄* | Eₐ |
| 323 | E₁ₐEᵢE₄ | AlkLEᵥEᵥᵢ | E₄* | Eₐ |
| 324 | E_{1b}EᵢE₄ | AlkLEᵥEᵥᵢ | E₄* | Eₐ |
| 325 | E₁ₐEᵢᵢE₄ | AlkLEᵥEᵥᵢ | E₄* | Eₐ |
| 326 | E_{1b}EᵢᵢE₄ | AlkLEᵥEᵥᵢ | E₄* | Eₐ |
| 327 | E₁ₐEᵢᵢE_{iib}E₄ | AlkLEᵥEᵥᵢ | E₄* | Eₐ |
| 328 | E_{1b}EᵢᵢE_{iib}E₄ | AlkLEᵥEᵥᵢ | E₄* | Eₐ |
| 329 | E₁ₐEᵢᵢᵢ | AlkLEᵥEᵥᵢ | E₄* | Eₐ |
| 330 | E_{1b}Eᵢᵢᵢ | AlkLEᵥEᵥᵢ | E₄* | Eₐ |
| 331 | E₁ₐEᵢᵢᵢE₄ | AlkLEᵥEᵥᵢ | E₄* | Eₐ |
| 332 | E_{1b}EᵢᵢᵢE₄ | AlkLEᵥEᵥᵢ | E₄* | Eₐ |
| 333 | E₁ₐEᵢᵥ | AlkLEᵥEᵥᵢ | E₄* | Eₐ |
| 334 | E_{1b}Eᵢᵥ | AlkLEᵥEᵥᵢ | E₄* | Eₐ |
| 335 | E₁ₐEᵢᵥE₄ | AlkLEᵥEᵥᵢ | E₄* | Eₐ |
| 336 | E_{1b}EᵢᵥE₄ | AlkLEᵥEᵥᵢ | E₄* | Eₐ |
| 337 | E₁ₐ | AlkLEᵥEᵥᵢ | E₅ | Eₐ |
| 338 | E_{1b} | AlkLEᵥEᵥᵢ | E₅ | Eₐ |
| 339 | E₁ₐEᵢ | AlkLEᵥEᵥᵢ | E₅ | Eₐ |
| 340 | E_{1b}Eᵢ | AlkLEᵥEᵥᵢ | E₅ | Eₐ |
| 341 | E₁ₐEᵢᵢ | AlkLEᵥEᵥᵢ | E₅ | Eₐ |
| 342 | E_{1b}Eᵢᵢ | AlkLEᵥEᵥᵢ | E₅ | Eₐ |
| 343 | E₁ₐEᵢᵢE_{iib} | AlkLEᵥEᵥᵢ | E₅ | Eₐ |
| 344 | E_{1b}EᵢᵢE_{iib} | AlkLEᵥEᵥᵢ | E₅ | Eₐ |
| 345 | E₁ₐE₄ | AlkLEᵥEᵥᵢ | E₅ | Eₐ |
| 346 | E_{1b}E₄ | AlkLEᵥEᵥᵢ | E₅ | Eₐ |
| 347 | E₁ₐEᵢE₄ | AlkLEᵥEᵥᵢ | E₅ | Eₐ |
| 348 | E_{1b}EᵢE₄ | AlkLEᵥEᵥᵢ | E₅ | Eₐ |
| 349 | E₁ₐEᵢᵢE₄ | AlkLEᵥEᵥᵢ | E₅ | Eₐ |
| 350 | E_{1b}EᵢᵢE₄ | AlkLEᵥEᵥᵢ | E₅ | Eₐ |
| 351 | E₁ₐEᵢᵢE_{iib}E₄ | AlkLEᵥEᵥᵢ | E₅ | Eₐ |
| 352 | E_{1b}EᵢᵢE_{iib}E₄ | AlkLEᵥEᵥᵢ | E₅ | Eₐ |
| 353 | E₁ₐEᵢᵢᵢ | AlkLEᵥEᵥᵢ | E₅ | Eₐ |
| 354 | E_{1b}Eᵢᵢᵢ | AlkLEᵥEᵥᵢ | E₅ | Eₐ |
| 355 | E₁ₐEᵢᵢᵢE₄ | AlkLEᵥEᵥᵢ | E₅ | Eₐ |
| 356 | E_{1b}EᵢᵢᵢE₄ | AlkLEᵥEᵥᵢ | E₅ | Eₐ |
| 357 | E₁ₐEᵢᵥ | AlkLEᵥEᵥᵢ | E₅ | Eₐ |
| 358 | E_{1b}Eᵢᵥ | AlkLEᵥEᵥᵢ | E₅ | Eₐ |
| 359 | E₁ₐEᵢᵥE₄ | AlkLEᵥEᵥᵢ | E₅ | Eₐ |
| 360 | E_{1b}EᵢᵥE₄ | AlkLEᵥEᵥᵢ | E₅ | Eₐ |
| 361 | E₁ₐ | AlkLEᵥEᵥᵢ | E₄*E₅ | Eₐ |
| 362 | E_{1b} | AlkLEᵥEᵥᵢ | E₄*E₅ | Eₐ |
| 363 | E₁ₐEᵢ | AlkLEᵥEᵥᵢ | E₄*E₅ | Eₐ |
| 364 | E_{1b}Eᵢ | AlkLEᵥEᵥᵢ | E₄*E₅ | Eₐ |
| 365 | E₁ₐEᵢᵢ | AlkLEᵥEᵥᵢ | E₄*E₅ | Eₐ |
| 366 | E_{1b}Eᵢᵢ | AlkLEᵥEᵥᵢ | E₄*E₅ | Eₐ |
| 367 | E₁ₐEᵢᵢE_{iib} | AlkLEᵥEᵥᵢ | E₄*E₅ | Eₐ |
| 368 | E_{1b}EᵢᵢE_{iib} | AlkLEᵥEᵥᵢ | E₄*E₅ | Eₐ |
| 369 | E₁ₐE₄ | AlkLEᵥEᵥᵢ | E₄*E₅ | Eₐ |
| 370 | E_{1b}E₄ | AlkLEᵥEᵥᵢ | E₄*E₅ | Eₐ |
| 371 | E₁ₐEᵢE₄ | AlkLEᵥEᵥᵢ | E₄*E₅ | Eₐ |
| 372 | E_{1b}EᵢE₄ | AlkLEᵥEᵥᵢ | E₄*E₅ | Eₐ |
| 373 | E₁ₐEᵢᵢE₄ | AlkLEᵥEᵥᵢ | E₄*E₅ | Eₐ |
| 374 | E_{1b}EᵢᵢE₄ | AlkLEᵥEᵥᵢ | E₄*E₅ | Eₐ |
| 375 | E₁ₐEᵢᵢE_{iib}E₄ | AlkLEᵥEᵥᵢ | E₄*E₅ | Eₐ |
| 376 | E_{1b}EᵢᵢE_{iib}E₄ | AlkLEᵥEᵥᵢ | E₄*E₅ | Eₐ |
| 377 | E₁ₐEᵢᵢᵢ | AlkLEᵥEᵥᵢ | E₄*E₅ | Eₐ |
| 378 | E_{1b}Eᵢᵢᵢ | AlkLEᵥEᵥᵢ | E₄*E₅ | Eₐ |
| 379 | E₁ₐEᵢᵢᵢE₄ | AlkLEᵥEᵥᵢ | E₄*E₅ | Eₐ |
| 380 | E_{1b}EᵢᵢᵢE₄ | AlkLEᵥEᵥᵢ | E₄*E₅ | Eₐ |
| 381 | E₁ₐEᵢᵥ | AlkLEᵥEᵥᵢ | E₄*E₅ | Eₐ |
| 382 | E_{1b}Eᵢᵥ | AlkLEᵥEᵥᵢ | E₄*E₅ | Eₐ |
| 383 | E₁ₐEᵢᵥE₄ | AlkLEᵥEᵥᵢ | E₄*E₅ | Eₐ |
| 384 | E_{1b}EᵢᵥE₄ | AlkLEᵥEᵥᵢ | E₄*E₅ | Eₐ |
| 385 | E₁ₐ | EᵥEᵥᵢ | | E_{b} |
| 386 | E_{1b} | EᵥEᵥᵢ | | E_{b} |
| 387 | E₁ₐEᵢ | EᵥEᵥᵢ | | E_{b} |
| 388 | E_{1b}Eᵢ | EᵥEᵥᵢ | | E_{b} |
| 389 | E₁ₐEᵢᵢ | EᵥEᵥᵢ | | E_{b} |
| 390 | E_{1b}Eᵢᵢ | EᵥEᵥᵢ | | E_{b} |
| 391 | E₁ₐEᵢᵢE_{iib} | EᵥEᵥᵢ | | E_{b} |
| 392 | E_{1b}EᵢᵢE_{iib} | EᵥEᵥᵢ | | E_{b} |
| 393 | E₁ₐE₄ | EᵥEᵥᵢ | | E_{b} |
| 394 | E_{1b}E₄ | EᵥEᵥᵢ | | E_{b} |
| 395 | E₁ₐEᵢE₄ | EᵥEᵥᵢ | | E_{b} |
| 396 | E_{1b}EᵢE₄ | EᵥEᵥᵢ | | E_{b} |
| 397 | E₁ₐEᵢᵢE₄ | EᵥEᵥᵢ | | E_{b} |
| 398 | E_{1b}EᵢᵢE₄ | EᵥEᵥᵢ | | E_{b} |
| 399 | E₁ₐEᵢᵢE_{iib}E₄ | EᵥEᵥᵢ | | E_{b} |
| 400 | E_{1b}EᵢᵢE_{iib}E₄ | EᵥEᵥᵢ | | E_{b} |
| 401 | E₁ₐEᵢᵢᵢ | EᵥEᵥᵢ | | E_{b} |
| 402 | E_{1b}Eᵢᵢᵢ | EᵥEᵥᵢ | | E_{b} |
| 403 | E₁ₐEᵢᵢᵢE₄ | EᵥEᵥᵢ | | E_{b} |
| 404 | E_{1b}EᵢᵢᵢE₄ | EᵥEᵥᵢ | | E_{b} |
| 405 | E₁ₐEᵢᵥ | EᵥEᵥᵢ | | E_{b} |
| 406 | E_{1b}Eᵢᵥ | EᵥEᵥᵢ | | E_{b} |
| 407 | E₁ₐEᵢᵥE₄ | EᵥEᵥᵢ | | E_{b} |
| 408 | E_{1b}EᵢᵥE₄ | EᵥEᵥᵢ | | E_{b} |
| 409 | E₁ₐ | EᵥEᵥᵢ | E₄* | E_{b} |
| 410 | E_{1b} | EᵥEᵥᵢ | E₄* | E_{b} |
| 411 | E₁ₐEᵢ | EᵥEᵥᵢ | E₄* | E_{b} |
| 412 | E_{1b}Eᵢ | EᵥEᵥᵢ | E₄* | E_{b} |
| 413 | E₁ₐEᵢᵢ | EᵥEᵥᵢ | E₄* | E_{b} |
| 414 | E_{1b}Eᵢᵢ | EᵥEᵥᵢ | E₄* | E_{b} |
| 415 | E₁ₐEᵢᵢE_{iib} | EᵥEᵥᵢ | E₄* | E_{b} |
| 416 | E_{1b}EᵢᵢE_{iib} | EᵥEᵥᵢ | E₄* | E_{b} |
| 417 | E₁ₐE₄ | EᵥEᵥᵢ | E₄* | E_{b} |
| 418 | E_{1b}E₄ | EᵥEᵥᵢ | E₄* | E_{b} |
| 419 | E₁ₐEᵢE₄ | EᵥEᵥᵢ | E₄* | E_{b} |
| 420 | E_{1b}EᵢE₄ | EᵥEᵥᵢ | E₄* | E_{b} |
| 421 | E₁ₐEᵢᵢE₄ | EᵥEᵥᵢ | E₄* | E_{b} |
| 422 | E_{1b}EᵢᵢE₄ | EᵥEᵥᵢ | E₄* | E_{b} |
| 423 | E₁ₐEᵢᵢE_{iib}E₄ | EᵥEᵥᵢ | E₄* | E_{b} |
| 424 | E_{1b}EᵢᵢE_{iib}E₄ | EᵥEᵥᵢ | E₄* | E_{b} |
| 425 | E₁ₐEᵢᵢᵢ | EᵥEᵥᵢ | E₄* | E_{b} |
| 426 | E_{1b}Eᵢᵢᵢ | EᵥEᵥᵢ | E₄* | E_{b} |
| 427 | E₁ₐEᵢᵢᵢE₄ | EᵥEᵥᵢ | E₄* | E_{b} |
| 428 | E_{1b}EᵢᵢᵢE₄ | EᵥEᵥᵢ | E₄* | E_{b} |
| 429 | E₁ₐEᵢᵥ | EᵥEᵥᵢ | E₄* | E_{b} |
| 430 | E_{1b}Eᵢᵥ | EᵥEᵥᵢ | E₄* | E_{b} |
| 431 | E₁ₐEᵢᵥE₄ | EᵥEᵥᵢ | E₄* | E_{b} |
| 432 | E_{1b}EᵢᵥE₄ | EᵥEᵥᵢ | E₄* | E_{b} |
| 433 | E₁ₐ | EᵥEᵥᵢ | E₅ | E_{b} |
| 434 | E_{1b} | EᵥEᵥᵢ | E₅ | E_{b} |
| 435 | E₁ₐEᵢ | EᵥEᵥᵢ | E₅ | E_{b} |
| 436 | E_{1b}Eᵢ | EᵥEᵥᵢ | E₅ | E_{b} |
| 437 | E₁ₐEᵢᵢ | EᵥEᵥᵢ | E₅ | E_{b} |
| 438 | E_{1b}Eᵢᵢ | EᵥEᵥᵢ | E₅ | E_{b} |
| 439 | E₁ₐEᵢᵢE_{iib} | EᵥEᵥᵢ | E₅ | E_{b} |
| 440 | E_{1b}EᵢᵢE_{iib} | EᵥEᵥᵢ | E₅ | E_{b} |
| 441 | E₁ₐE₄ | EᵥEᵥᵢ | E₅ | E_{b} |
| 442 | E_{1b}E₄ | EᵥEᵥᵢ | E₅ | E_{b} |
| 443 | E₁ₐEᵢE₄ | EᵥEᵥᵢ | E₅ | E_{b} |
| 444 | E_{1b}EᵢE₄ | EᵥEᵥᵢ | E₅ | E_{b} |
| 445 | E₁ₐEᵢᵢE₄ | EᵥEᵥᵢ | E₅ | E_{b} |
| 446 | E_{1b}EᵢᵢE₄ | EᵥEᵥᵢ | E₅ | E_{b} |
| 447 | E₁ₐEᵢᵢE_{iib}E₄ | EᵥEᵥᵢ | E₅ | E_{b} |
| 448 | E_{1b}EᵢᵢE_{iib}E₄ | EᵥEᵥᵢ | E₅ | E_{b} |
| 449 | E₁ₐEᵢᵢᵢ | EᵥEᵥᵢ | E₅ | E_{b} |
| 450 | E_{1b}Eᵢᵢᵢ | EᵥEᵥᵢ | E₅ | E_{b} |
| 451 | E₁ₐEᵢᵢᵢE₄ | EᵥEᵥᵢ | E₅ | E_{b} |
| 452 | E_{1b}EᵢᵢᵢE₄ | EᵥEᵥᵢ | E₅ | E_{b} |
| 453 | E₁ₐEᵢᵥ | EᵥEᵥᵢ | E₅ | E_{b} |
| 454 | E_{1b}Eᵢᵥ | EᵥEᵥᵢ | E₅ | E_{b} |
| 455 | E₁ₐEᵢᵥE₄ | EᵥEᵥᵢ | E₅ | E_{b} |
| 456 | E_{1b}EᵢᵥE₄ | EᵥEᵥᵢ | E₅ | E_{b} |
| 457 | E₁ₐ | EᵥEᵥᵢ | E₄*E₅ | E_{b} |
| 458 | E_{1b} | EᵥEᵥᵢ | E₄*E₅ | E_{b} |
| 459 | E₁ₐEᵢ | EᵥEᵥᵢ | E₄*E₅ | E_{b} |
| 460 | E_{1b}Eᵢ | EᵥEᵥᵢ | E₄*E₅ | E_{b} |
| 461 | E₁ₐEᵢᵢ | EᵥEᵥᵢ | E₄*E₅ | E_{b} |
| 462 | E_{1b}Eᵢᵢ | EᵥEᵥᵢ | E₄*E₅ | E_{b} |
| 463 | E₁ₐEᵢᵢE_{iib} | EᵥEᵥᵢ | E₄*E₅ | E_{b} |
| 464 | E_{1b}EᵢᵢE_{iib} | EᵥEᵥᵢ | E₄*E₅ | E_{b} |
| 465 | E₁ₐE₄ | EᵥEᵥᵢ | E₄*E₅ | E_{b} |
| 466 | E_{1b}E₄ | EᵥEᵥᵢ | E₄*E₅ | E_{b} |
| 467 | E₁ₐEᵢE₄ | EᵥEᵥᵢ | E₄*E₅ | E_{b} |
| 468 | E_{1b}EᵢE₄ | EᵥEᵥᵢ | E₄*E₅ | E_{b} |
| 469 | E₁ₐEᵢᵢE₄ | EᵥEᵥᵢ | E₄*E₅ | E_{b} |
| 470 | E_{1b}EᵢᵢE₄ | EᵥEᵥᵢ | E₄*E₅ | E_{b} |
| 471 | E₁ₐEᵢᵢE_{iib}E₄ | EᵥEᵥᵢ | E₄*E₅ | E_{b} |
| 472 | E_{1b}EᵢᵢE_{iib}E₄ | EᵥEᵥᵢ | E₄*E₅ | E_{b} |
| 473 | E₁ₐEᵢᵢᵢ | EᵥEᵥᵢ | E₄*E₅ | E_{b} |
| 474 | E_{1b}Eᵢᵢᵢ | EᵥEᵥᵢ | E₄*E₅ | E_{b} |
| 475 | E₁ₐEᵢᵢᵢE₄ | EᵥEᵥᵢ | E₄*E₅ | E_{b} |
| 476 | E_{1b}EᵢᵢᵢE₄ | EᵥEᵥᵢ | E₄*E₅ | E_{b} |
| 477 | E₁ₐEᵢᵥ | EᵥEᵥᵢ | E₄*E₅ | E_{b} |
| 478 | E_{1b}Eᵢᵥ | EᵥEᵥᵢ | E₄*E₅ | E_{b} |
| 479 | E₁ₐEᵢᵥE₄ | EᵥEᵥᵢ | E₄*E₅ | E_{b} |
| 480 | E_{1b}EᵢᵥE₄ | EᵥEᵥᵢ | E₄*E₅ | E_{b} |
| 481 | E₁ₐ | AlkLEᵥEᵥᵢ | | E_{b} |
| 482 | E_{1b} | AlkLEᵥEᵥᵢ | | E_{b} |
| 483 | E₁ₐEᵢ | AlkLEᵥEᵥᵢ | | E_{b} |
| 484 | E_{1b}Eᵢ | AlkLEᵥEᵥᵢ | | E_{b} |
| 485 | E₁ₐEᵢᵢ | AlkLEᵥEᵥᵢ | | E_{b} |
| 486 | E_{1b}Eᵢᵢ | AlkLEᵥEᵥᵢ | | E_{b} |
| 487 | E₁ₐEᵢᵢE_{iib} | AlkLEᵥEᵥᵢ | | E_{b} |
| 488 | E_{1b}EᵢᵢE_{iib} | AlkLEᵥEᵥᵢ | | E_{b} |
| 489 | E₁ₐE₄ | AlkLEᵥEᵥᵢ | | E_{b} |
| 490 | E_{1b}E₄ | AlkLEᵥEᵥᵢ | | E_{b} |
| 491 | E₁ₐEᵢE₄ | AlkLEᵥEᵥᵢ | | E_{b} |
| 492 | E_{1b}EᵢE₄ | AlkLEᵥEᵥᵢ | | E_{b} |
| 493 | E₁ₐEᵢᵢE₄ | AlkLEᵥEᵥᵢ | | E_{b} |
| 494 | E_{1b}EᵢᵢE₄ | AlkLEᵥEᵥᵢ | | E_{b} |
| 495 | E₁ₐEᵢᵢE_{iib}E₄ | AlkLEᵥEᵥᵢ | | E_{b} |
| 496 | E_{1b}EᵢᵢE_{iib}E₄ | AlkLEᵥEᵥᵢ | | E_{b} |
| 497 | E₁ₐEᵢᵢᵢ | AlkLEᵥEᵥᵢ | | E_{b} |
| 498 | E_{1b}Eᵢᵢᵢ | AlkLEᵥEᵥᵢ | | E_{b} |
| 499 | E₁ₐEᵢᵢᵢE₄ | AlkLEᵥEᵥᵢ | | E_{b} |
| 500 | E_{1b}EᵢᵢᵢE₄ | AlkLEᵥEᵥᵢ | | E_{b} |
| 501 | E₁ₐEᵢᵥ | AlkLEᵥEᵥᵢ | | E_{b} |
| 502 | E_{1b}Eᵢᵥ | AlkLEᵥEᵥᵢ | | E_{b} |
| 503 | E₁ₐEᵢᵥE₄ | AlkLEᵥEᵥᵢ | | E_{b} |
| 504 | E_{1b}EᵢᵥE₄ | AlkLEᵥEᵥᵢ | | E_{b} |
| 505 | E₁ₐ | AlkLEᵥEᵥᵢ | E₄* | E_{b} |
| 506 | E_{1b} | AlkLEᵥEᵥᵢ | E₄* | E_{b} |
| 507 | E₁ₐEᵢ | AlkLEᵥEᵥᵢ | E₄* | E_{b} |
| 508 | E_{1b}Eᵢ | AlkLEᵥEᵥᵢ | E₄* | E_{b} |
| 509 | E₁ₐEᵢᵢ | AlkLEᵥEᵥᵢ | E₄* | E_{b} |
| 510 | E_{1b}Eᵢᵢ | AlkLEᵥEᵥᵢ | E₄* | E_{b} |
| 511 | E₁ₐEᵢᵢE_{iib} | AlkLEᵥEᵥᵢ | E₄* | E_{b} |
| 512 | E_{1b}EᵢᵢE_{iib} | AlkLEᵥEᵥᵢ | E₄* | E_{b} |
| 513 | E₁ₐE₄ | AlkLEᵥEᵥᵢ | E₄* | E_{b} |
| 514 | E_{1b}E₄ | AlkLEᵥEᵥᵢ | E₄* | E_{b} |
| 515 | E₁ₐEᵢE₄ | AlkLEᵥEᵥᵢ | E₄* | E_{b} |
| 516 | E_{1b}EᵢE₄ | AlkLEᵥEᵥᵢ | E₄* | E_{b} |
| 517 | E₁ₐEᵢᵢE₄ | AlkLEᵥEᵥᵢ | E₄* | E_{b} |
| 518 | E_{1b}EᵢᵢE₄ | AlkLEᵥEᵥᵢ | E₄* | E_{b} |
| 519 | E₁ₐEᵢᵢE_{iib}E₄ | AlkLEᵥEᵥᵢ | E₄* | E_{b} |
| 520 | E_{1b}EᵢᵢE_{iib}E₄ | AlkLEᵥEᵥᵢ | E₄* | E_{b} |
| 521 | E₁ₐEᵢᵢᵢ | AlkLEᵥEᵥᵢ | E₄* | E_{b} |
| 522 | E_{1b}Eᵢᵢᵢ | AlkLEᵥEᵥᵢ | E₄* | E_{b} |
| 523 | E₁ₐEᵢᵢᵢE₄ | AlkLEᵥEᵥᵢ | E₄* | E_{b} |
| 524 | E_{1b}EᵢᵢᵢE₄ | AlkLEᵥEᵥᵢ | E₄* | E_{b} |
| 525 | E₁ₐEᵢᵥ | AlkLEᵥEᵥᵢ | E₄* | E_{b} |
| 526 | E_{1b}Eᵢᵥ | AlkLEᵥEᵥᵢ | E₄* | E_{b} |
| 527 | E₁ₐEᵢᵥE₄ | AlkLEᵥEᵥᵢ | E₄* | E_{b} |
| 528 | E_{1b}EᵢᵥE₄ | AlkLEᵥEᵥᵢ | E₄* | E_{b} |
| 529 | E₁ₐ | AlkLEᵥEᵥᵢ | E₅ | E_{b} |
| 530 | E_{1b} | AlkLEᵥEᵥᵢ | E₅ | E_{b} |
| 531 | E₁ₐEᵢ | AlkLEᵥEᵥᵢ | E₅ | E_{b} |
| 532 | E_{1b}Eᵢ | AlkLEᵥEᵥᵢ | E₅ | E_{b} |
| 533 | E₁ₐEᵢᵢ | AlkLEᵥEᵥᵢ | E₅ | E_{b} |
| 534 | E_{1b}Eᵢᵢ | AlkLEᵥEᵥᵢ | E₅ | E_{b} |
| 535 | E₁ₐEᵢᵢE_{iib} | AlkLEᵥEᵥᵢ | E₅ | E_{b} |
| 536 | E_{1b}EᵢᵢE_{iib} | AlkLEᵥEᵥᵢ | E₅ | E_{b} |
| 537 | E₁ₐE₄ | AlkLEᵥEᵥᵢ | E₅ | E_{b} |
| 538 | E_{1b}E₄ | AlkLEᵥEᵥᵢ | E₅ | E_{b} |
| 539 | E₁ₐEᵢE₄ | AlkLEᵥEᵥᵢ | E₅ | E_{b} |
| 540 | E_{1b}EᵢE₄ | AlkLEᵥEᵥᵢ | E₅ | E_{b} |
| 541 | E₁ₐEᵢᵢE₄ | AlkLEᵥEᵥᵢ | E₅ | E_{b} |
| 542 | E_{1b}EᵢᵢE₄ | AlkLEᵥEᵥᵢ | E₅ | E_{b} |
| 543 | E₁ₐEᵢᵢE_{iib}E₄ | AlkLEᵥEᵥᵢ | E₅ | E_{b} |
| 544 | E_{1b}EᵢᵢE_{iib}E₄ | AlkLEᵥEᵥᵢ | E₅ | E_{b} |
| 545 | E₁ₐEᵢᵢᵢ | AlkLEᵥEᵥᵢ | E₅ | E_{b} |
| 546 | E_{1b}Eᵢᵢᵢ | AlkLEᵥEᵥᵢ | E₅ | E_{b} |
| 547 | E₁ₐEᵢᵢᵢE₄ | AlkLEᵥEᵥᵢ | E₅ | E_{b} |
| 548 | E_{1b}EᵢᵢᵢE₄ | AlkLEᵥEᵥᵢ | E₅ | E_{b} |
| 549 | E₁ₐEᵢᵥ | AlkLEᵥEᵥᵢ | E₅ | E_{b} |
| 550 | E_{1b}Eᵢᵥ | AlkLEᵥEᵥᵢ | E₅ | E_{b} |
| 551 | E₁ₐEᵢᵥE₄ | AlkLEᵥEᵥᵢ | E₅ | E_{b} |
| 552 | E_{1b}EᵢᵥE₄ | AlkLEᵥEᵥᵢ | E₅ | E_{b} |
| 553 | E₁ₐ | AlkLEᵥEᵥᵢ | E₄*E₅ | E_{b} |
| 554 | E_{1b} | AlkLEᵥEᵥᵢ | E₄*E₅ | E_{b} |
| 555 | E₁ₐEᵢ | AlkLEᵥEᵥᵢ | E₄*E₅ | E_{b} |
| 556 | E_{1b}Eᵢ | AlkLEᵥEᵥᵢ | E₄*E₅ | E_{b} |
| 557 | E₁ₐEᵢᵢ | AlkLEᵥEᵥᵢ | E₄*E₅ | E_{b} |
| 558 | E_{1b}Eᵢᵢ | AlkLEᵥEᵥᵢ | E₄*E₅ | E_{b} |
| 559 | E₁ₐEᵢᵢE_{iib} | AlkLEᵥEᵥᵢ | E₄*E₅ | E_{b} |
| 560 | E_{1b}EᵢᵢE_{iib} | AlkLEᵥEᵥᵢ | E₄*E₅ | E_{b} |
| 561 | E₁ₐE₄ | AlkLEᵥEᵥᵢ | E₄*E₅ | E_{b} |
| 562 | E_{1b}E₄ | AlkLEᵥEᵥᵢ | E₄*E₅ | E_{b} |
| 563 | E₁ₐEᵢE₄ | AlkLEᵥEᵥᵢ | E₄*E₅ | E_{b} |
| 564 | E_{1b}EᵢE₄ | AlkLEᵥEᵥᵢ | E₄*E₅ | E_{b} |
| 565 | E₁ₐEᵢᵢE₄ | AlkLEᵥEᵥᵢ | E₄*E₅ | E_{b} |
| 566 | E_{1b}EᵢᵢE₄ | AlkLEᵥEᵥᵢ | E₄*E₅ | E_{b} |
| 567 | E₁ₐEᵢᵢE_{iib}E₄ | AlkLEᵥEᵥᵢ | E₄*E₅ | E_{b} |
| 568 | E_{1b}EᵢᵢE_{iib}E₄ | AlkLEᵥEᵥᵢ | E₄*E₅ | E_{b} |
| 569 | E₁ₐEᵢᵢᵢ | AlkLEᵥEᵥᵢ | E₄*E₅ | E_{b} |
| 570 | E_{1b}Eᵢᵢᵢ | AlkLEᵥEᵥᵢ | E₄*E₅ | E_{b} |
| 571 | E₁ₐEᵢᵢᵢE₄ | AlkLEᵥEᵥᵢ | E₄*E₅ | E_{b} |
| 572 | E_{1b}EᵢᵢᵢE₄ | AlkLEᵥEᵥᵢ | E₄*E₅ | E_{b} |
| 573 | E₁ₐEᵢᵥ | AlkLEᵥEᵥᵢ | E₄*E₅ | E_{b} |
| 574 | E_{1b}Eᵢᵥ | AlkLEᵥEᵥᵢ | E₄*E₅ | E_{b} |
| 575 | E₁ₐEᵢᵥE₄ | AlkLEᵥEᵥᵢ | E₄*E₅ | E_{b} |
| 576 | E_{1b}EᵢᵥE₄ | AlkLEᵥEᵥᵢ | E₄*E₅ | E_{b} |
| 577 | E₁ₐ | EᵥEᵥᵢ | | E_{d} |
| 578 | E_{1b} | EᵥEᵥᵢ | | E_{d} |
| 579 | E₁ₐEᵢ | EᵥEᵥᵢ | | E_{d} |
| 580 | E_{1b}Eᵢ | EᵥEᵥᵢ | | E_{d} |
| 581 | E₁ₐEᵢᵢ | EᵥEᵥᵢ | | E_{d} |
| 582 | E_{1b}Eᵢᵢ | EᵥEᵥᵢ | | E_{d} |
| 583 | E₁ₐEᵢᵢE_{iib} | EᵥEᵥᵢ | | E_{d} |
| 584 | E_{1b}EᵢᵢE_{iib} | EᵥEᵥᵢ | | E_{d} |
| 585 | E₁ₐE₄ | EᵥEᵥᵢ | | E_{d} |
| 586 | E_{1b}E₄ | EᵥEᵥᵢ | | E_{d} |
| 587 | E₁ₐEᵢE₄ | EᵥEᵥᵢ | | E_{d} |
| 588 | E_{1b}EᵢE₄ | EᵥEᵥᵢ | | E_{d} |
| 589 | E₁ₐEᵢᵢE₄ | EᵥEᵥᵢ | | E_{d} |
| 590 | E_{1b}EᵢᵢE₄ | EᵥEᵥᵢ | | E_{d} |
| 591 | E₁ₐEᵢᵢE_{iib}E₄ | EᵥEᵥᵢ | | E_{d} |
| 592 | E_{1b}EᵢᵢE_{iib}E₄ | EᵥEᵥᵢ | | E_{d} |
| 593 | E₁ₐEᵢᵢᵢ | EᵥEᵥᵢ | | E_{d} |
| 594 | E_{1b}Eᵢᵢᵢ | EᵥEᵥᵢ | | E_{d} |
| 595 | E₁ₐEᵢᵢᵢE₄ | EᵥEᵥᵢ | | E_{d} |
| 596 | E_{1b}EᵢᵢᵢE₄ | EᵥEᵥᵢ | | E_{d} |
| 597 | E₁ₐEᵢᵥ | EᵥEᵥᵢ | | E_{d} |
| 598 | E_{1b}Eᵢᵥ | EᵥEᵥᵢ | | E_{d} |
| 599 | E₁ₐEᵢᵥE₄ | EᵥEᵥᵢ | | E_{d} |
| 600 | E_{1b}EᵢᵥE₄ | EᵥEᵥᵢ | | E_{d} |
| 601 | E₁ₐ | EᵥEᵥᵢ | E₄* | E_{d} |
| 602 | E_{1b} | EᵥEᵥᵢ | E₄* | E_{d} |
| 603 | E₁ₐEᵢ | EᵥEᵥᵢ | E₄* | E_{d} |
| 604 | E_{1b}Eᵢ | EᵥEᵥᵢ | E₄* | E_{d} |
| 605 | E₁ₐEᵢᵢ | EᵥEᵥᵢ | E₄* | E_{d} |
| 606 | E_{1b}Eᵢᵢ | EᵥEᵥᵢ | E₄* | E_{d} |
| 607 | E₁ₐEᵢᵢE_{iib} | EᵥEᵥᵢ | E₄* | E_{d} |
| 608 | E_{1b}EᵢᵢE_{iib} | EᵥEᵥᵢ | E₄* | E_{d} |
| 609 | E₁ₐE₄ | EᵥEᵥᵢ | E₄* | E_{d} |
| 610 | E_{1b}E₄ | EᵥEᵥᵢ | E₄* | E_{d} |
| 611 | E₁ₐEᵢE₄ | EᵥEᵥᵢ | E₄* | E_{d} |
| 612 | E_{1b}EᵢE₄ | EᵥEᵥᵢ | E₄* | E_{d} |
| 613 | E₁ₐEᵢᵢE₄ | EᵥEᵥᵢ | E₄* | E_{d} |
| 614 | E_{1b}EᵢᵢE₄ | EᵥEᵥᵢ | E₄* | E_{d} |
| 615 | E₁ₐEᵢᵢE_{iib}E₄ | EᵥEᵥᵢ | E₄* | E_{d} |
| 616 | E_{1b}EᵢᵢE_{iib}E₄ | EᵥEᵥᵢ | E₄* | E_{d} |
| 617 | E₁ₐEᵢᵢᵢ | EᵥEᵥᵢ | E₄* | E_{d} |
| 618 | E_{1b}Eᵢᵢᵢ | EᵥEᵥᵢ | E₄* | E_{d} |
| 619 | E₁ₐEᵢᵢᵢE₄ | EᵥEᵥᵢ | E₄* | E_{d} |
| 620 | E_{1b}EᵢᵢᵢE₄ | EᵥEᵥᵢ | E₄* | E_{d} |
| 621 | E₁ₐEᵢᵥ | EᵥEᵥᵢ | E₄* | E_{d} |
| 622 | E_{1b}Eᵢᵥ | EᵥEᵥᵢ | E₄* | E_{d} |
| 623 | E₁ₐEᵢᵥE₄ | EᵥEᵥᵢ | E₄* | E_{d} |
| 624 | E_{1b}EᵢᵥE₄ | EᵥEᵥᵢ | E₄* | E_{d} |
| 625 | E₁ₐ | EᵥEᵥᵢ | E₅ | E_{d} |
| 626 | E_{1b} | EᵥEᵥᵢ | E₅ | E_{d} |
| 627 | E₁ₐEᵢ | EᵥEᵥᵢ | E₅ | E_{d} |
| 628 | E_{1b}Eᵢ | EᵥEᵥᵢ | E₅ | E_{d} |
| 629 | E₁ₐEᵢᵢ | EᵥEᵥᵢ | E₅ | E_{d} |
| 630 | E_{1b}Eᵢᵢ | EᵥEᵥᵢ | E₅ | E_{d} |
| 631 | E₁ₐEᵢᵢE_{iib} | EᵥEᵥᵢ | E₅ | E_{d} |
| 632 | E_{1b}EᵢᵢE_{iib} | EᵥEᵥᵢ | E₅ | E_{d} |
| 633 | E₁ₐE₄ | EᵥEᵥᵢ | E₅ | E_{d} |
| 634 | E_{1b}E₄ | EᵥEᵥᵢ | E₅ | E_{d} |
| 635 | E₁ₐEᵢE₄ | EᵥEᵥᵢ | E₅ | E_{d} |
| 636 | E_{1b}EᵢE₄ | EᵥEᵥᵢ | E₅ | E_{d} |
| 637 | E₁ₐEᵢᵢE₄ | EᵥEᵥᵢ | E₅ | E_{d} |
| 638 | E_{1b}EᵢᵢE₄ | EᵥEᵥᵢ | E₅ | E_{d} |
| 639 | E₁ₐEᵢᵢE_{iib}E₄ | EᵥEᵥᵢ | E₅ | E_{d} |
| 640 | E_{1b}EᵢᵢE_{iib}E₄ | EᵥEᵥᵢ | E₅ | E_{d} |
| 641 | E₁ₐEᵢᵢᵢ | EᵥEᵥᵢ | E₅ | E_{d} |
| 642 | E_{1b}Eᵢᵢᵢ | EᵥEᵥᵢ | E₅ | E_{d} |
| 643 | E₁ₐEᵢᵢᵢE₄ | EᵥEᵥᵢ | E₅ | E_{d} |
| 644 | E_{1b}EᵢᵢᵢE₄ | EᵥEᵥᵢ | E₅ | E_{d} |
| 645 | E₁ₐEᵢᵥ | EᵥEᵥᵢ | E₅ | E_{d} |
| 646 | E_{1b}Eᵢᵥ | EᵥEᵥᵢ | E₅ | E_{d} |
| 647 | E₁ₐEᵢᵥE₄ | EᵥEᵥᵢ | E₅ | E_{d} |
| 648 | E_{1b}EᵢᵥE₄ | EᵥEᵥᵢ | E₅ | E_{d} |
| 649 | E₁ₐ | EᵥEᵥᵢ | E₄*E₅ | E_{d} |
| 650 | E_{1b} | EᵥEᵥᵢ | E₄*E₅ | E_{d} |
| 651 | E₁ₐEᵢ | EᵥEᵥᵢ | E₄*E₅ | E_{d} |
| 652 | E_{1b}Eᵢ | EᵥEᵥᵢ | E₄*E₅ | E_{d} |
| 653 | E₁ₐEᵢᵢ | EᵥEᵥᵢ | E₄*E₅ | E_{d} |
| 654 | E_{1b}Eᵢᵢ | EᵥEᵥᵢ | E₄*E₅ | E_{d} |
| 655 | E₁ₐEᵢᵢE_{iib} | EᵥEᵥᵢ | E₄*E₅ | E_{d} |
| 656 | E_{1b}EᵢᵢE_{iib} | EᵥEᵥᵢ | E₄*E₅ | E_{d} |
| 657 | E₁ₐE₄ | EᵥEᵥᵢ | E₄*E₅ | E_{d} |
| 658 | E_{1b}E₄ | EᵥEᵥᵢ | E₄*E₅ | E_{d} |
| 659 | E₁ₐEᵢE₄ | EᵥEᵥᵢ | E₄*E₅ | E_{d} |
| 660 | E_{1b}EᵢE₄ | EᵥEᵥᵢ | E₄*E₅ | E_{d} |
| 661 | E₁ₐEᵢᵢE₄ | EᵥEᵥᵢ | E₄*E₅ | E_{d} |
| 662 | E_{1b}EᵢᵢE₄ | EᵥEᵥᵢ | E₄*E₅ | E_{d} |
| 663 | E₁ₐEᵢᵢE_{iib}E₄ | EᵥEᵥᵢ | E₄*E₅ | E_{d} |
| 664 | E_{1b}EᵢᵢE_{iib}E₄ | EᵥEᵥᵢ | E₄*E₅ | E_{d} |
| 665 | E₁ₐEᵢᵢᵢ | EᵥEᵥᵢ | E₄*E₅ | E_{d} |
| 666 | E_{1b}Eᵢᵢᵢ | EᵥEᵥᵢ | E₄*E₅ | E_{d} |
| 667 | E₁ₐEᵢᵢᵢE₄ | EᵥEᵥᵢ | E₄*E₅ | E_{d} |
| 668 | E_{1b}EᵢᵢᵢE₄ | EᵥEᵥᵢ | E₄*E₅ | E_{d} |
| 669 | E₁ₐEᵢᵥ | EᵥEᵥᵢ | E₄*E₅ | E_{d} |
| 670 | E_{1b}Eᵢᵥ | EᵥEᵥᵢ | E₄*E₅ | E_{d} |
| 671 | E₁ₐEᵢᵥE₄ | EᵥEᵥᵢ | E₄*E₅ | E_{d} |
| 672 | E_{1b}EᵢᵥE₄ | EᵥEᵥᵢ | E₄*E₅ | E_{d} |
| 673 | E₁ₐ | AlkLEᵥEᵥᵢ | | E_{d} |
| 674 | E_{1b} | AlkLEᵥEᵥᵢ | | E_{d} |
| 675 | E₁ₐEᵢ | AlkLEᵥEᵥᵢ | | E_{d} |
| 676 | E_{1b}Eᵢ | AlkLEᵥEᵥᵢ | | E_{d} |
| 677 | E₁ₐEᵢᵢ | AlkLEᵥEᵥᵢ | | E_{d} |
| 678 | E_{1b}Eᵢᵢ | AlkLEᵥEᵥᵢ | | E_{d} |
| 679 | E₁ₐEᵢᵢE_{iib} | AlkLEᵥEᵥᵢ | | E_{d} |
| 680 | E_{1b}EᵢᵢE_{iib} | AlkLEᵥEᵥᵢ | | E_{d} |
| 681 | E₁ₐE₄ | AlkLEᵥEᵥᵢ | | E_{d} |
| 682 | E_{1b}E₄ | AlkLEᵥEᵥᵢ | | E_{d} |
| 683 | E₁ₐEᵢE₄ | AlkLEᵥEᵥᵢ | | E_{d} |
| 684 | E_{1b}EᵢE₄ | AlkLEᵥEᵥᵢ | | E_{d} |
| 685 | E₁ₐEᵢᵢE₄ | AlkLEᵥEᵥᵢ | | E_{d} |
| 686 | E_{1b}EᵢᵢE₄ | AlkLEᵥEᵥᵢ | | E_{d} |
| 687 | E₁ₐEᵢᵢE_{iib}E₄ | AlkLEᵥEᵥᵢ | | E_{d} |
| 688 | E_{1b}EᵢᵢE_{iib}E₄ | AlkLEᵥEᵥᵢ | | E_{d} |
| 689 | E₁ₐEᵢᵢᵢ | AlkLEᵥEᵥᵢ | | E_{d} |
| 690 | E_{1b}Eᵢᵢᵢ | AlkLEᵥEᵥᵢ | | E_{d} |
| 691 | E₁ₐEᵢᵢᵢE₄ | AlkLEᵥEᵥᵢ | | E_{d} |
| 692 | E_{1b}EᵢᵢᵢE₄ | AlkLEᵥEᵥᵢ | | E_{d} |
| 693 | E₁ₐEᵢᵥ | AlkLEᵥEᵥᵢ | | E_{d} |
| 694 | E_{1b}Eᵢᵥ | AlkLEᵥEᵥᵢ | | E_{d} |
| 695 | E₁ₐEᵢᵥE₄ | AlkLEᵥEᵥᵢ | | E_{d} |
| 696 | E_{1b}EᵢᵥE₄ | AlkLEᵥEᵥᵢ | | E_{d} |
| 697 | E₁ₐ | AlkLEᵥEᵥᵢ | E₄* | E_{d} |
| 698 | E_{1b} | AlkLEᵥEᵥᵢ | E₄* | E_{d} |
| 699 | E₁ₐEᵢ | AlkLEᵥEᵥᵢ | E₄* | E_{d} |
| 700 | E_{1b}Eᵢ | AlkLEᵥEᵥᵢ | E₄* | E_{d} |
| 701 | E₁ₐEᵢᵢ | AlkLEᵥEᵥᵢ | E₄* | E_{d} |
| 702 | E_{1b}Eᵢᵢ | AlkLEᵥEᵥᵢ | E₄* | E_{d} |
| 703 | E₁ₐEᵢᵢE_{iib} | AlkLEᵥEᵥᵢ | E₄* | E_{d} |
| 704 | E_{1b}EᵢᵢE_{iib} | AlkLEᵥEᵥᵢ | E₄* | E_{d} |
| 705 | E₁ₐE₄ | AlkLEᵥEᵥᵢ | E₄* | E_{d} |
| 706 | E_{1b}E₄ | AlkLEᵥEᵥᵢ | E₄* | E_{d} |
| 707 | E₁ₐEᵢE₄ | AlkLEᵥEᵥᵢ | E₄* | E_{d} |
| 708 | E_{1b}EᵢE₄ | AlkLEᵥEᵥᵢ | E₄* | E_{d} |
| 709 | E₁ₐEᵢᵢE₄ | AlkLEᵥEᵥᵢ | E₄* | E_{d} |
| 710 | E_{1b}EᵢᵢE₄ | AlkLEᵥEᵥᵢ | E₄* | E_{d} |
| 711 | E₁ₐEᵢᵢE_{iib}E₄ | AlkLEᵥEᵥᵢ | E₄* | E_{d} |
| 712 | E_{1b}EᵢᵢE_{iib}E₄ | AlkLEᵥEᵥᵢ | E₄* | E_{d} |
| 713 | E₁ₐEᵢᵢᵢ | AlkLEᵥEᵥᵢ | E₄* | E_{d} |
| 714 | E_{1b}Eᵢᵢᵢ | AlkLEᵥEᵥᵢ | E₄* | E_{d} |
| 715 | E₁ₐEᵢᵢᵢE₄ | AlkLEᵥEᵥᵢ | E₄* | E_{d} |
| 716 | E_{1b}EᵢᵢᵢE₄ | AlkLEᵥEᵥᵢ | E₄* | E_{d} |
| 717 | E₁ₐEᵢᵥ | AlkLEᵥEᵥᵢ | E₄* | E_{d} |
| 718 | E_{1b}Eᵢᵥ | AlkLEᵥEᵥᵢ | E₄* | E_{d} |
| 719 | E₁ₐEᵢᵥE₄ | AlkLEᵥEᵥᵢ | E₄* | E_{d} |
| 720 | E_{1b}EᵢᵥE₄ | AlkLEᵥEᵥᵢ | E₄* | E_{d} |
| 721 | E₁ₐ | AlkLEᵥEᵥᵢ | E₅ | E_{d} |
| 722 | E_{1b} | AlkLEᵥEᵥᵢ | E₅ | E_{d} |
| 723 | E₁ₐEᵢ | AlkLEᵥEᵥᵢ | E₅ | E_{d} |
| 724 | E_{1b}Eᵢ | AlkLEᵥEᵥᵢ | E₅ | E_{d} |
| 725 | E₁ₐEᵢᵢ | AlkLEᵥEᵥᵢ | E₅ | E_{d} |
| 726 | E_{1b}Eᵢᵢ | AlkLEᵥEᵥᵢ | E₅ | E_{d} |
| 727 | E₁ₐEᵢᵢE_{iib} | AlkLEᵥEᵥᵢ | E₅ | E_{d} |
| 728 | E_{1b}EᵢᵢE_{iib} | AlkLEᵥEᵥᵢ | E₅ | E_{d} |
| 729 | E₁ₐE₄ | AlkLEᵥEᵥᵢ | E₅ | E_{d} |
| 730 | E_{1b}E₄ | AlkLEᵥEᵥᵢ | E₅ | E_{d} |
| 731 | E₁ₐEᵢE₄ | AlkLEᵥEᵥᵢ | E₅ | E_{d} |
| 732 | E_{1b}EᵢE₄ | AlkLEᵥEᵥᵢ | E₅ | E_{d} |
| 733 | E₁ₐEᵢᵢE₄ | AlkLEᵥEᵥᵢ | E₅ | E_{d} |
| 734 | E_{1b}EᵢᵢE₄ | AlkLEᵥEᵥᵢ | E₅ | E_{d} |
| 735 | E₁ₐEᵢᵢE_{iib}E₄ | AlkLEᵥEᵥᵢ | E₅ | E_{d} |
| 736 | E_{1b}EᵢᵢE_{iib}E₄ | AlkLEᵥEᵥᵢ | E₅ | E_{d} |
| 737 | E₁ₐEᵢᵢᵢ | AlkLEᵥEᵥᵢ | E₅ | E_{d} |
| 738 | E_{1b}Eᵢᵢᵢ | AlkLEᵥEᵥᵢ | E₅ | E_{d} |
| 739 | E₁ₐEᵢᵢᵢE₄ | AlkLEᵥEᵥᵢ | E₅ | E_{d} |
| 740 | E_{1b}EᵢᵢᵢE₄ | AlkLEᵥEᵥᵢ | E₅ | E_{d} |
| 741 | E₁ₐEᵢᵥ | AlkLEᵥEᵥᵢ | E₅ | E_{d} |
| 742 | E_{1b}Eᵢᵥ | AlkLEᵥEᵥᵢ | E₅ | E_{d} |
| 743 | E₁ₐEᵢᵥE₄ | AlkLEᵥEᵥᵢ | E₅ | E_{d} |
| 744 | E_{1b}EᵢᵥE₄ | AlkLEᵥEᵥᵢ | E₅ | E_{d} |
| 745 | E₁ₐ | AlkLEᵥEᵥᵢ | E₄*E₅ | E_{d} |
| 746 | E_{1b} | AlkLEᵥEᵥᵢ | E₄*E₅ | E_{d} |
| 747 | E₁ₐEᵢ | AlkLEᵥEᵥᵢ | E₄*E₅ | E_{d} |
| 748 | E_{1b}Eᵢ | AlkLEᵥEᵥᵢ | E₄*E₅ | E_{d} |
| 749 | E₁ₐEᵢᵢ | AlkLEᵥEᵥᵢ | E₄*E₅ | E_{d} |
| 750 | E_{1b}Eᵢᵢ | AlkLEᵥEᵥᵢ | E₄*E₅ | E_{d} |
| 751 | E₁ₐEᵢᵢE_{iib} | AlkLEᵥEᵥᵢ | E₄*E₅ | E_{d} |
| 752 | E_{1b}EᵢᵢE_{iib} | AlkLEᵥEᵥᵢ | E₄*E₅ | E_{d} |
| 753 | E₁ₐE₄ | AlkLEᵥEᵥᵢ | E₄*E₅ | E_{d} |
| 754 | E_{1b}E₄ | AlkLEᵥEᵥᵢ | E₄*E₅ | E_{d} |
| 755 | E₁ₐEᵢE₄ | AlkLEᵥEᵥᵢ | E₄*E₅ | E_{d} |
| 756 | E_{1b}EᵢE₄ | AlkLEᵥEᵥᵢ | E₄*E₅ | E_{d} |
| 757 | E₁ₐEᵢᵢE₄ | AlkLEᵥEᵥᵢ | E₄*E₅ | E_{d} |
| 758 | E_{1b}EᵢᵢE₄ | AlkLEᵥEᵥᵢ | E₄*E₅ | E_{d} |
| 759 | E₁ₐEᵢᵢE_{iib}E₄ | AlkLEᵥEᵥᵢ | E₄*E₅ | E_{d} |
| 760 | E_{1b}EᵢᵢE_{iib}E₄ | AlkLEᵥEᵥᵢ | E₄*E₅ | E_{d} |
| 761 | E₁ₐEᵢᵢᵢ | AlkLEᵥEᵥᵢ | E₄*E₅ | E_{d} |
| 762 | E_{1b}Eᵢᵢᵢ | AlkLEᵥEᵥᵢ | E₄*E₅ | E_{d} |
| 763 | E₁ₐEᵢᵢᵢE₄ | AlkLEᵥEᵥᵢ | E₄*E₅ | E_{d} |
| 764 | E_{1b}EᵢᵢᵢE₄ | AlkLEᵥEᵥᵢ | E₄*E₅ | E_{d} |
| 765 | E₁ₐEᵢᵥ | AlkLEᵥEᵥᵢ | E₄*E₅ | E_{d} |
| 766 | E_{1b}Eᵢᵥ | AlkLEᵥEᵥᵢ | E₄*E₅ | E_{d} |
| 767 | E₁ₐEᵢᵥE₄ | AlkLEᵥEᵥᵢ | E₄*E₅ | E_{d} |
| 768 | E_{1b}EᵢᵥE₄ | AlkLEᵥEᵥᵢ | E₄*E₅ | E_{d} |
| 769 | E₁ₐ | EᵥEᵥᵢ | | Eₑ |
| 770 | E_{1b} | EᵥEᵥᵢ | | Eₑ |
| 771 | E₁ₐEᵢ | EᵥEᵥᵢ | | Eₑ |
| 772 | E_{1b}Eᵢ | EᵥEᵥᵢ | | Eₑ |
| 773 | E₁ₐEᵢᵢ | EᵥEᵥᵢ | | Eₑ |
| 774 | E_{1b}Eᵢᵢ | EᵥEᵥᵢ | | Eₑ |
| 775 | E₁ₐEᵢᵢE_{iib} | EᵥEᵥᵢ | | Eₑ |
| 776 | E_{1b}EᵢᵢE_{iib} | EᵥEᵥᵢ | | Eₑ |
| 777 | E₁ₐE₄ | EᵥEᵥᵢ | | Eₑ |
| 778 | E_{1b}E₄ | EᵥEᵥᵢ | | Eₑ |
| 779 | E₁ₐEᵢE₄ | EᵥEᵥᵢ | | Eₑ |
| 780 | E_{1b}EᵢE₄ | EᵥEᵥᵢ | | Eₑ |
| 781 | E₁ₐEᵢᵢE₄ | EᵥEᵥᵢ | | Eₑ |
| 782 | E_{1b}EᵢᵢE₄ | EᵥEᵥᵢ | | Eₑ |
| 783 | E₁ₐEᵢᵢE_{iib}E₄ | EᵥEᵥᵢ | | Eₑ |
| 784 | E_{1b}EᵢᵢE_{iib}E₄ | EᵥEᵥᵢ | | Eₑ |
| 785 | E₁ₐEᵢᵢᵢ | EᵥEᵥᵢ | | Eₑ |
| 786 | E_{1b}Eᵢᵢᵢ | EᵥEᵥᵢ | | Eₑ |
| 787 | E₁ₐEᵢᵢᵢE₄ | EᵥEᵥᵢ | | Eₑ |
| 788 | E_{1b}EᵢᵢᵢE₄ | EᵥEᵥᵢ | | Eₑ |
| 789 | E₁ₐEᵢᵥ | EᵥEᵥᵢ | | Eₑ |
| 790 | E_{1b}Eᵢᵥ | EᵥEᵥᵢ | | Eₑ |
| 791 | E₁ₐEᵢᵥE₄ | EᵥEᵥᵢ | | Eₑ |
| 792 | E_{1b}EᵢᵥE₄ | EᵥEᵥᵢ | | Eₑ |
| 793 | E₁ₐ | EᵥEᵥᵢ | E₄* | Eₑ |
| 794 | E_{1b} | EᵥEᵥᵢ | E₄* | Eₑ |
| 795 | E₁ₐEᵢ | EᵥEᵥᵢ | E₄* | Eₑ |
| 796 | E_{1b}Eᵢ | EᵥEᵥᵢ | E₄* | Eₑ |
| 797 | E₁ₐEᵢᵢ | EᵥEᵥᵢ | E₄* | Eₑ |
| 798 | E_{1b}Eᵢᵢ | EᵥEᵥᵢ | E₄* | Eₑ |
| 799 | E₁ₐEᵢᵢE_{iib} | EᵥEᵥᵢ | E₄* | Eₑ |
| 800 | E_{1b}EᵢᵢE_{iib} | EᵥEᵥᵢ | E₄* | Eₑ |
| 801 | E₁ₐE₄ | EᵥEᵥᵢ | E₄* | Eₑ |
| 802 | E_{1b}E₄ | EᵥEᵥᵢ | E₄* | Eₑ |
| 803 | E₁ₐEᵢE₄ | EᵥEᵥᵢ | E₄* | Eₑ |
| 804 | E_{1b}EᵢE₄ | EᵥEᵥᵢ | E₄* | Eₑ |
| 805 | E₁ₐEᵢᵢE₄ | EᵥEᵥᵢ | E₄* | Eₑ |
| 806 | E_{1b}EᵢᵢE₄ | EᵥEᵥᵢ | E₄* | Eₑ |
| 807 | E₁ₐEᵢᵢE_{iib}E₄ | EᵥEᵥᵢ | E₄* | Eₑ |
| 808 | E_{1b}EᵢᵢE_{iib}E₄ | EᵥEᵥᵢ | E₄* | Eₑ |
| 809 | E₁ₐEᵢᵢᵢ | EᵥEᵥᵢ | E₄* | Eₑ |
| 810 | E_{1b}Eᵢᵢᵢ | EᵥEᵥᵢ | E₄* | Eₑ |
| 811 | E₁ₐEᵢᵢᵢE₄ | EᵥEᵥᵢ | E₄* | Eₑ |
| 812 | E_{1b}EᵢᵢᵢE₄ | EᵥEᵥᵢ | E₄* | Eₑ |
| 813 | E₁ₐEᵢᵥ | EᵥEᵥᵢ | E₄* | Eₑ |
| 814 | E_{1b}Eᵢᵥ | EᵥEᵥᵢ | E₄* | Eₑ |
| 815 | E₁ₐEᵢᵥE₄ | EᵥEᵥᵢ | E₄* | Eₑ |
| 816 | E_{1b}EᵢᵥE₄ | EᵥEᵥᵢ | E₄* | Eₑ |
| 817 | E₁ₐ | EᵥEᵥᵢ | E₅ | Eₑ |
| 818 | E_{1b} | EᵥEᵥᵢ | E₅ | Eₑ |
| 819 | E₁ₐEᵢ | EᵥEᵥᵢ | E₅ | Eₑ |
| 820 | E_{1b}Eᵢ | EᵥEᵥᵢ | E₅ | Eₑ |
| 821 | E₁ₐEᵢᵢ | EᵥEᵥᵢ | E₅ | Eₑ |
| 822 | E_{1b}Eᵢᵢ | EᵥEᵥᵢ | E₅ | Eₑ |
| 823 | E₁ₐEᵢᵢE_{iib} | EᵥEᵥᵢ | E₅ | Eₑ |
| 824 | E_{1b}EᵢᵢE_{iib} | EᵥEᵥᵢ | E₅ | Eₑ |
| 825 | E₁ₐE₄ | EᵥEᵥᵢ | E₅ | Eₑ |
| 826 | E_{1b}E₄ | EᵥEᵥᵢ | E₅ | Eₑ |
| 827 | E₁ₐEᵢE₄ | EᵥEᵥᵢ | E₅ | Eₑ |
| 828 | E_{1b}EᵢE₄ | EᵥEᵥᵢ | E₅ | Eₑ |
| 829 | E₁ₐEᵢᵢE₄ | EᵥEᵥᵢ | E₅ | Eₑ |
| 830 | E_{1b}EᵢᵢE₄ | EᵥEᵥᵢ | E₅ | Eₑ |
| 831 | E₁ₐEᵢᵢE_{iib}E₄ | EᵥEᵥᵢ | E₅ | Eₑ |
| 832 | E_{1b}EᵢᵢE_{iib}E₄ | EᵥEᵥᵢ | E₅ | Eₑ |
| 833 | E₁ₐEᵢᵢᵢ | EᵥEᵥᵢ | E₅ | Eₑ |
| 834 | E_{1b}Eᵢᵢᵢ | EᵥEᵥᵢ | E₅ | Eₑ |
| 835 | E₁ₐEᵢᵢᵢE₄ | EᵥEᵥᵢ | E₅ | Eₑ |
| 836 | E_{1b}EᵢᵢᵢE₄ | EᵥEᵥᵢ | E₅ | Eₑ |
| 837 | E₁ₐEᵢᵥ | EᵥEᵥᵢ | E₅ | Eₑ |
| 838 | E_{1b}Eᵢᵥ | EᵥEᵥᵢ | E₅ | Eₑ |
| 839 | E₁ₐEᵢᵥE₄ | EᵥEᵥᵢ | E₅ | Eₑ |
| 840 | E_{1b}EᵢᵥE₄ | EᵥEᵥᵢ | E₅ | Eₑ |
| 841 | E₁ₐ | EᵥEᵥᵢ | E₄*E₅ | Eₑ |
| 842 | E_{1b} | EᵥEᵥᵢ | E₄*E₅ | Eₑ |
| 843 | E₁ₐEᵢ | EᵥEᵥᵢ | E₄*E₅ | Eₑ |
| 844 | E_{1b}Eᵢ | EᵥEᵥᵢ | E₄*E₅ | Eₑ |
| 845 | E₁ₐEᵢᵢ | EᵥEᵥᵢ | E₄*E₅ | Eₑ |
| 846 | E_{1b}Eᵢᵢ | EᵥEᵥᵢ | E₄*E₅ | Eₑ |
| 847 | E₁ₐEᵢᵢE_{iib} | EᵥEᵥᵢ | E₄*E₅ | Eₑ |
| 848 | E_{1b}EᵢᵢE_{iib} | EᵥEᵥᵢ | E₄*E₅ | Eₑ |
| 849 | E₁ₐE₄ | EᵥEᵥᵢ | E₄*E₅ | Eₑ |
| 850 | E_{1b}E₄ | EᵥEᵥᵢ | E₄*E₅ | Eₑ |
| 851 | E₁ₐEᵢE₄ | EᵥEᵥᵢ | E₄*E₅ | Eₑ |
| 852 | E_{1b}EᵢE₄ | EᵥEᵥᵢ | E₄*E₅ | Eₑ |
| 853 | E₁ₐEᵢᵢE₄ | EᵥEᵥᵢ | E₄*E₅ | Eₑ |
| 854 | E_{1b}EᵢᵢE₄ | EᵥEᵥᵢ | E₄*E₅ | Eₑ |
| 855 | E₁ₐEᵢᵢE_{iib}E₄ | EᵥEᵥᵢ | E₄*E₅ | Eₑ |
| 856 | E_{1b}EᵢᵢE_{iib}E₄ | EᵥEᵥᵢ | E₄*E₅ | Eₑ |
| 857 | E₁ₐEᵢᵢᵢ | EᵥEᵥᵢ | E₄*E₅ | Eₑ |
| 858 | E_{1b}Eᵢᵢᵢ | EᵥEᵥᵢ | E₄*E₅ | Eₑ |
| 859 | E₁ₐEᵢᵢᵢE₄ | EᵥEᵥᵢ | E₄*E₅ | Eₑ |
| 860 | E_{1b}EᵢᵢᵢE₄ | EᵥEᵥᵢ | E₄*E₅ | Eₑ |
| 861 | E₁ₐEᵢᵥ | EᵥEᵥᵢ | E₄*E₅ | Eₑ |
| 862 | E_{1b}Eᵢᵥ | EᵥEᵥᵢ | E₄*E₅ | Eₑ |
| 863 | E₁ₐEᵢᵥE₄ | EᵥEᵥᵢ | E₄*E₅ | Eₑ |
| 864 | E_{1b}EᵢᵥE₄ | EᵥEᵥᵢ | E₄*E₅ | Eₑ |
| 865 | E₁ₐ | AlkLEᵥEᵥᵢ | | Eₑ |
| 866 | E_{1b} | AlkLEᵥEᵥᵢ | | Eₑ |
| 867 | E₁ₐEᵢ | AlkLEᵥEᵥᵢ | | Eₑ |
| 868 | E_{1b}Eᵢ | AlkLEᵥEᵥᵢ | | Eₑ |
| 869 | E₁ₐEᵢᵢ | AlkLEᵥEᵥᵢ | | Eₑ |
| 870 | E_{1b}Eᵢᵢ | AlkLEᵥEᵥᵢ | | Eₑ |
| 871 | E₁ₐEᵢᵢE_{iib} | AlkLEᵥEᵥᵢ | | Eₑ |
| 872 | E_{1b}EᵢᵢE_{iib} | AlkLEᵥEᵥᵢ | | Eₑ |
| 873 | E₁ₐE₄ | AlkLEᵥEᵥᵢ | | Eₑ |
| 874 | E_{1b}E₄ | AlkLEᵥEᵥᵢ | | Eₑ |
| 875 | E₁ₐEᵢE₄ | AlkLEᵥEᵥᵢ | | Eₑ |
| 876 | E_{1b}EᵢE₄ | AlkLEᵥEᵥᵢ | | Eₑ |
| 877 | E₁ₐEᵢᵢE₄ | AlkLEᵥEᵥᵢ | | Eₑ |
| 878 | E_{1b}EᵢᵢE₄ | AlkLEᵥEᵥᵢ | | Eₑ |
| 879 | E₁ₐEᵢᵢE_{iib}E₄ | AlkLEᵥEᵥᵢ | | Eₑ |
| 880 | E_{1b}EᵢᵢE_{iib}E₄ | AlkLEᵥEᵥᵢ | | Eₑ |
| 881 | E₁ₐEᵢᵢᵢ | AlkLEᵥEᵥᵢ | | Eₑ |
| 882 | E_{1b}Eᵢᵢᵢ | AlkLEᵥEᵥᵢ | | Eₑ |
| 883 | E₁ₐEᵢᵢᵢE₄ | AlkLEᵥEᵥᵢ | | Eₑ |
| 884 | E_{1b}EᵢᵢᵢE₄ | AlkLEᵥEᵥᵢ | | Eₑ |
| 885 | E₁ₐEᵢᵥ | AlkLEᵥEᵥᵢ | | Eₑ |
| 886 | E_{1b}Eᵢᵥ | AlkLEᵥEᵥᵢ | | Eₑ |
| 887 | E₁ₐEᵢᵥE₄ | AlkLEᵥEᵥᵢ | | Eₑ |
| 888 | E_{1b}EᵢᵥE₄ | AlkLEᵥEᵥᵢ | | Eₑ |
| 889 | E₁ₐ | AlkLEᵥEᵥᵢ | E₄* | Eₑ |
| 890 | E_{1b} | AlkLEᵥEᵥᵢ | E₄* | Eₑ |
| 891 | E₁ₐEᵢ | AlkLEᵥEᵥᵢ | E₄* | Eₑ |
| 892 | E_{1b}Eᵢ | AlkLEᵥEᵥᵢ | E₄* | Eₑ |
| 893 | E₁ₐEᵢᵢ | AlkLEᵥEᵥᵢ | E₄* | Eₑ |
| 894 | E_{1b}Eᵢᵢ | AlkLEᵥEᵥᵢ | E₄* | Eₑ |
| 895 | E₁ₐEᵢᵢE_{iib} | AlkLEᵥEᵥᵢ | E₄* | Eₑ |
| 896 | E_{1b}EᵢᵢE_{iib} | AlkLEᵥEᵥᵢ | E₄* | Eₑ |
| 897 | E₁ₐE₄ | AlkLEᵥEᵥᵢ | E₄* | Eₑ |
| 898 | E_{1b}E₄ | AlkLEᵥEᵥᵢ | E₄* | Eₑ |
| 899 | E₁ₐEᵢE₄ | AlkLEᵥEᵥᵢ | E₄* | Eₑ |
| 900 | E_{1b}EᵢE₄ | AlkLEᵥEᵥᵢ | E₄* | Eₑ |
| 901 | E₁ₐEᵢᵢE₄ | AlkLEᵥEᵥᵢ | E₄* | Eₑ |
| 902 | E_{1b}EᵢᵢE₄ | AlkLEᵥEᵥᵢ | E₄* | Eₑ |
| 903 | E₁ₐEᵢᵢE_{iib}E₄ | AlkLEᵥEᵥᵢ | E₄* | Eₑ |
| 904 | E_{1b}EᵢᵢE_{iib}E₄ | AlkLEᵥEᵥᵢ | E₄* | Eₑ |
| 905 | E₁ₐEᵢᵢᵢ | AlkLEᵥEᵥᵢ | E₄* | Eₑ |
| 906 | E_{1b}Eᵢᵢᵢ | AlkLEᵥEᵥᵢ | E₄* | Eₑ |
| 907 | E₁ₐEᵢᵢᵢE₄ | AlkLEᵥEᵥᵢ | E₄* | Eₑ |
| 908 | E_{1b}EᵢᵢᵢE₄ | AlkLEᵥEᵥᵢ | E₄* | Eₑ |
| 909 | E₁ₐEᵢᵥ | AlkLEᵥEᵥᵢ | E₄* | Eₑ |
| 910 | E_{1b}Eᵢᵥ | AlkLEᵥEᵥᵢ | E₄* | Eₑ |
| 911 | E₁ₐEᵢᵥE₄ | AlkLEᵥEᵥᵢ | E₄* | Eₑ |
| 912 | E_{1b}EᵢᵥE₄ | AlkLEᵥEᵥᵢ | E₄* | Eₑ |
| 913 | E₁ₐ | AlkLEᵥEᵥᵢ | E₅ | Eₑ |
| 914 | E_{1b} | AlkLEᵥEᵥᵢ | E₅ | Eₑ |
| 915 | E₁ₐEᵢ | AlkLEᵥEᵥᵢ | E₅ | Eₑ |
| 916 | E_{1b}Eᵢ | AlkLEᵥEᵥᵢ | E₅ | Eₑ |
| 917 | E₁ₐEᵢᵢ | AlkLEᵥEᵥᵢ | E₅ | Eₑ |
| 918 | E_{1b}Eᵢᵢ | AlkLEᵥEᵥᵢ | E₅ | Eₑ |
| 919 | E₁ₐEᵢᵢE_{iib} | AlkLEᵥEᵥᵢ | E₅ | Eₑ |
| 920 | E_{1b}EᵢᵢE_{iib} | AlkLEᵥEᵥᵢ | E₅ | Eₑ |
| 921 | E₁ₐE₄ | AlkLEᵥEᵥᵢ | E₅ | Eₑ |
| 922 | E_{1b}E₄ | AlkLEᵥEᵥᵢ | E₅ | Eₑ |
| 923 | E₁ₐEᵢE₄ | AlkLEᵥEᵥᵢ | E₅ | Eₑ |
| 924 | E_{1b}EᵢE₄ | AlkLEᵥEᵥᵢ | E₅ | Eₑ |
| 925 | E₁ₐEᵢᵢE₄ | AlkLEᵥEᵥᵢ | E₅ | Eₑ |
| 926 | E_{1b}EᵢᵢE₄ | AlkLEᵥEᵥᵢ | E₅ | Eₑ |
| 927 | E₁ₐEᵢᵢE_{iib}E₄ | AlkLEᵥEᵥᵢ | E₅ | Eₑ |
| 928 | E_{1b}EᵢᵢE_{iib}E₄ | AlkLEᵥEᵥᵢ | E₅ | Eₑ |
| 929 | E₁ₐEᵢᵢᵢ | AlkLEᵥEᵥᵢ | E₅ | Eₑ |
| 930 | E_{1b}Eᵢᵢᵢ | AlkLEᵥEᵥᵢ | E₅ | Eₑ |
| 931 | E₁ₐEᵢᵢᵢE₄ | AlkLEᵥEᵥᵢ | E₅ | Eₑ |
| 932 | E_{1b}EᵢᵢᵢE₄ | AlkLEᵥEᵥᵢ | E₅ | Eₑ |
| 933 | E₁ₐEᵢᵥ | AlkLEᵥEᵥᵢ | E₅ | Eₑ |
| 934 | E_{1b}Eᵢᵥ | AlkLEᵥEᵥᵢ | E₅ | Eₑ |
| 935 | E₁ₐEᵢᵥE₄ | AlkLEᵥEᵥᵢ | E₅ | Eₑ |
| 936 | E_{1b}EᵢᵥE₄ | AlkLEᵥEᵥᵢ | E₅ | Eₑ |
| 937 | E₁ₐ | AlkLEᵥEᵥᵢ | E₄*E₅ | Eₑ |
| 938 | E_{1b} | AlkLEᵥEᵥᵢ | E₄*E₅ | Eₑ |
| 939 | E₁ₐEᵢ | AlkLEᵥEᵥᵢ | E₄*E₅ | Eₑ |
| 940 | E_{1b}Eᵢ | AlkLEᵥEᵥᵢ | E₄*E₅ | Eₑ |
| 941 | E₁ₐEᵢᵢ | AlkLEᵥEᵥᵢ | E₄*E₅ | Eₑ |
| 942 | E_{1b}Eᵢᵢ | AlkLEᵥEᵥᵢ | E₄*E₅ | Eₑ |
| 943 | E₁ₐEᵢᵢE_{iib} | AlkLEᵥEᵥᵢ | E₄*E₅ | Eₑ |
| 944 | E_{1b}EᵢᵢE_{iib} | AlkLEᵥEᵥᵢ | E₄*E₅ | Eₑ |
| 945 | E₁ₐE₄ | AlkLEᵥEᵥᵢ | E₄*E₅ | Eₑ |
| 946 | E_{1b}E₄ | AlkLEᵥEᵥᵢ | E₄*E₅ | Eₑ |
| 947 | E₁ₐEᵢE₄ | AlkLEᵥEᵥᵢ | E₄*E₅ | Eₑ |
| 948 | E_{1b}EᵢE₄ | AlkLEᵥEᵥᵢ | E₄*E₅ | Eₑ |
| 949 | E₁ₐEᵢᵢE₄ | AlkLEᵥEᵥᵢ | E₄*E₅ | Eₑ |
| 950 | E_{1b}EᵢᵢE₄ | AlkLEᵥEᵥᵢ | E₄*E₅ | Eₑ |
| 951 | E₁ₐEᵢᵢE_{iib}E₄ | AlkLEᵥEᵥᵢ | E₄*E₅ | Eₑ |
| 952 | E_{1b}EᵢᵢE_{iib}E₄ | AlkLEᵥEᵥᵢ | E₄*E₅ | Eₑ |
| 953 | E₁ₐEᵢᵢᵢ | AlkLEᵥEᵥᵢ | E₄*E₅ | Eₑ |
| 954 | E_{1b}Eᵢᵢᵢ | AlkLEᵥEᵥᵢ | E₄*E₅ | Eₑ |
| 955 | E₁ₐEᵢᵢᵢE₄ | AlkLEᵥEᵥᵢ | E₄*E₅ | Eₑ |
| 956 | E_{1b}EᵢᵢᵢE₄ | AlkLEᵥEᵥᵢ | E₄*E₅ | Eₑ |
| 957 | E₁ₐEᵢᵥ | AlkLEᵥEᵥᵢ | E₄*E₅ | Eₑ |
| 958 | E_{1b}Eᵢᵥ | AlkLEᵥEᵥᵢ | E₄*E₅ | Eₑ |
| 959 | E₁ₐEᵢᵥE₄ | AlkLEᵥEᵥᵢ | E₄*E₅ | Eₑ |
| 960 | E_{1b}EᵢᵥE₄ | AlkLEᵥEᵥᵢ | E₄*E₅ | Eₑ |
| 961 | E₁ₐ | EᵥEᵥᵢ | | E_{f} |
| 962 | E_{1b} | EᵥEᵥᵢ | | E_{f} |
| 963 | E₁ₐEᵢ | EᵥEᵥᵢ | | E_{f} |
| 964 | E_{1b}Eᵢ | EᵥEᵥᵢ | | E_{f} |
| 965 | E₁ₐEᵢᵢ | EᵥEᵥᵢ | | E_{f} |
| 966 | E_{1b}Eᵢᵢ | EᵥEᵥᵢ | | E_{f} |
| 967 | E₁ₐEᵢᵢE_{iib} | EᵥEᵥᵢ | | E_{f} |
| 968 | E_{1b}EᵢᵢE_{iib} | EᵥEᵥᵢ | | E_{f} |
| 969 | E₁ₐE₄ | EᵥEᵥᵢ | | E_{f} |
| 970 | E_{1b}E₄ | EᵥEᵥᵢ | | E_{f} |
| 971 | E₁ₐEᵢE₄ | EᵥEᵥᵢ | | E_{f} |
| 972 | E_{1b}EᵢE₄ | EᵥEᵥᵢ | | E_{f} |
| 973 | E₁ₐEᵢᵢE₄ | EᵥEᵥᵢ | | E_{f} |
| 974 | E_{1b}EᵢᵢE₄ | EᵥEᵥᵢ | | E_{f} |
| 975 | E₁ₐEᵢᵢE_{iib}E₄ | EᵥEᵥᵢ | | E_{f} |
| 976 | E_{1b}EᵢᵢE_{iib}E₄ | EᵥEᵥᵢ | | E_{f} |
| 977 | E₁ₐEᵢᵢᵢ | EᵥEᵥᵢ | | E_{f} |
| 978 | E_{1b}Eᵢᵢᵢ | EᵥEᵥᵢ | | E_{f} |
| 979 | E₁ₐEᵢᵢᵢE₄ | EᵥEᵥᵢ | | E_{f} |
| 980 | E_{1b}EᵢᵢᵢE₄ | EᵥEᵥᵢ | | E_{f} |
| 981 | E₁ₐEᵢᵥ | EᵥEᵥᵢ | | E_{f} |
| 982 | E_{1b}Eᵢᵥ | EᵥEᵥᵢ | | E_{f} |
| 983 | E₁ₐEᵢᵥE₄ | EᵥEᵥᵢ | | E_{f} |
| 984 | E_{1b}EᵢᵥE₄ | EᵥEᵥᵢ | | E_{f} |
| 985 | E₁ₐ | EᵥEᵥᵢ | E₄* | E_{f} |
| 986 | E_{1b} | EᵥEᵥᵢ | E₄* | E_{f} |
| 987 | E₁ₐEᵢ | EᵥEᵥᵢ | E₄* | E_{f} |
| 988 | E_{1b}Eᵢ | EᵥEᵥᵢ | E₄* | E_{f} |
| 989 | E₁ₐEᵢᵢ | EᵥEᵥᵢ | E₄* | E_{f} |
| 990 | E_{1b}Eᵢᵢ | EᵥEᵥᵢ | E₄* | E_{f} |
| 991 | E₁ₐEᵢᵢE_{iib} | EᵥEᵥᵢ | E₄* | E_{f} |
| 992 | E_{1b}EᵢᵢE_{iib} | EᵥEᵥᵢ | E₄* | E_{f} |
| 993 | E₁ₐE₄ | EᵥEᵥᵢ | E₄* | E_{f} |
| 994 | E_{1b}E₄ | EᵥEᵥᵢ | E₄* | E_{f} |
| 995 | E₁ₐEᵢE₄ | EᵥEᵥᵢ | E₄* | E_{f} |
| 996 | E_{1b}EᵢE₄ | EᵥEᵥᵢ | E₄* | E_{f} |
| 997 | E₁ₐEᵢᵢE₄ | EᵥEᵥᵢ | E₄* | E_{f} |
| 998 | E_{1b}EᵢᵢE₄ | EᵥEᵥᵢ | E₄* | E_{f} |
| 999 | E₁ₐEᵢᵢE_{iib}E₄ | EᵥEᵥᵢ | E₄* | E_{f} |
| 1000 | E_{1b}EᵢᵢE_{iib}E₄ | EᵥEᵥᵢ | E₄* | E_{f} |
| 1001 | E₁ₐEᵢᵢᵢ | EᵥEᵥᵢ | E₄* | E_{f} |
| 1002 | E_{1b}Eᵢᵢᵢ | EᵥEᵥᵢ | E₄* | E_{f} |
| 1003 | E₁ₐEᵢᵢᵢE₄ | EᵥEᵥᵢ | E₄* | E_{f} |
| 1004 | E_{1b}EᵢᵢᵢE₄ | EᵥEᵥᵢ | E₄* | E_{f} |
| 1005 | E₁ₐEᵢᵥ | EᵥEᵥᵢ | E₄* | E_{f} |
| 1006 | E_{1b}Eᵢᵥ | EᵥEᵥᵢ | E₄* | E_{f} |
| 1007 | E₁ₐEᵢᵥE₄ | EᵥEᵥᵢ | E₄* | E_{f} |
| 1008 | E_{1b}EᵢᵥE₄ | EᵥEᵥᵢ | E₄* | E_{f} |
| 1009 | E₁ₐ | EᵥEᵥᵢ | E₅ | E_{f} |
| 1010 | E_{1b} | EᵥEᵥᵢ | E₅ | E_{f} |
| 1011 | E₁ₐEᵢ | EᵥEᵥᵢ | E₅ | E_{f} |
| 1012 | E_{1b}Eᵢ | EᵥEᵥᵢ | E₅ | E_{f} |
| 1013 | E₁ₐEᵢᵢ | EᵥEᵥᵢ | E₅ | E_{f} |
| 1014 | E_{1b}Eᵢᵢ | EᵥEᵥᵢ | E₅ | E_{f} |
| 1015 | E₁ₐEᵢᵢE_{iib} | EᵥEᵥᵢ | E₅ | E_{f} |
| 1016 | E_{1b}EᵢᵢE_{iib} | EᵥEᵥᵢ | E₅ | E_{f} |
| 1017 | E₁ₐE₄ | EᵥEᵥᵢ | E₅ | E_{f} |
| 1018 | E_{1b}E₄ | EᵥEᵥᵢ | E₅ | E_{f} |
| 1019 | E₁ₐEᵢE₄ | EᵥEᵥᵢ | E₅ | E_{f} |
| 1020 | E_{1b}EᵢE₄ | EᵥEᵥᵢ | E₅ | E_{f} |
| 1021 | E₁ₐEᵢᵢE₄ | EᵥEᵥᵢ | E₅ | E_{f} |
| 1022 | E_{1b}EᵢᵢE₄ | EᵥEᵥᵢ | E₅ | E_{f} |
| 1023 | E₁ₐEᵢᵢE_{iib}E₄ | EᵥEᵥᵢ | E₅ | E_{f} |
| 1024 | E_{1b}EᵢᵢE_{iib}E₄ | EᵥEᵥᵢ | E₅ | E_{f} |
| 1025 | E₁ₐEᵢᵢᵢ | EᵥEᵥᵢ | E₅ | E_{f} |
| 1026 | E_{1b}Eᵢᵢᵢ | EᵥEᵥᵢ | E₅ | E_{f} |
| 1027 | E₁ₐEᵢᵢᵢE₄ | EᵥEᵥᵢ | E₅ | E_{f} |
| 1028 | E_{1b}EᵢᵢᵢE₄ | EᵥEᵥᵢ | E₅ | E_{f} |
| 1029 | E₁ₐEᵢᵥ | EᵥEᵥᵢ | E₅ | E_{f} |
| 1030 | E_{1b}Eᵢᵥ | EᵥEᵥᵢ | E₅ | E_{f} |
| 1031 | E₁ₐEᵢᵥE₄ | EᵥEᵥᵢ | E₅ | E_{f} |
| 1032 | E_{1b}EᵢᵥE₄ | EᵥEᵥᵢ | E₅ | E_{f} |
| 1033 | E₁ₐ | EᵥEᵥᵢ | E₄*E₅ | E_{f} |
| 1034 | E_{1b} | EᵥEᵥᵢ | E₄*E₅ | E_{f} |
| 1035 | E₁ₐEᵢ | EᵥEᵥᵢ | E₄*E₅ | E_{f} |
| 1036 | E_{1b}Eᵢ | EᵥEᵥᵢ | E₄*E₅ | E_{f} |
| 1037 | E₁ₐEᵢᵢ | EᵥEᵥᵢ | E₄*E₅ | E_{f} |
| 1038 | E_{1b}Eᵢᵢ | EᵥEᵥᵢ | E₄*E₅ | E_{f} |
| 1039 | E₁ₐEᵢᵢE_{iib} | EᵥEᵥᵢ | E₄*E₅ | E_{f} |
| 1040 | E_{1b}EᵢᵢE_{iib} | EᵥEᵥᵢ | E₄*E₅ | E_{f} |
| 1041 | E₁ₐE₄ | EᵥEᵥᵢ | E₄*E₅ | E_{f} |
| 1042 | E_{1b}E₄ | EᵥEᵥᵢ | E₄*E₅ | E_{f} |
| 1043 | E₁ₐEᵢE₄ | EᵥEᵥᵢ | E₄*E₅ | E_{f} |
| 1044 | E_{1b}EᵢE₄ | EᵥEᵥᵢ | E₄*E₅ | E_{f} |
| 1045 | E₁ₐEᵢᵢE₄ | EᵥEᵥᵢ | E₄*E₅ | E_{f} |
| 1046 | E_{1b}EᵢᵢE₄ | EᵥEᵥᵢ | E₄*E₅ | E_{f} |
| 1047 | E₁ₐEᵢᵢE_{iib}E₄ | EᵥEᵥᵢ | E₄*E₅ | E_{f} |
| 1048 | E_{1b}EᵢᵢE_{iib}E₄ | EᵥEᵥᵢ | E₄*E₅ | E_{f} |
| 1049 | E₁ₐEᵢᵢᵢ | EᵥEᵥᵢ | E₄*E₅ | E_{f} |
| 1050 | E_{1b}Eᵢᵢᵢ | EᵥEᵥᵢ | E₄*E₅ | E_{f} |
| 1051 | E₁ₐEᵢᵢᵢE₄ | EᵥEᵥᵢ | E₄*E₅ | E_{f} |
| 1052 | E_{1b}EᵢᵢᵢE₄ | EᵥEᵥᵢ | E₄*E₅ | E_{f} |
| 1053 | E₁ₐEᵢᵥ | EᵥEᵥᵢ | E₄*E₅ | E_{f} |
| 1054 | E_{1b}Eᵢᵥ | EᵥEᵥᵢ | E₄*E₅ | E_{f} |
| 1055 | E₁ₐEᵢᵥE₄ | EᵥEᵥᵢ | E₄*E₅ | E_{f} |
| 1056 | E_{1b}EᵢᵥE₄ | EᵥEᵥᵢ | E₄*E₅ | E_{f} |
| 1057 | E₁ₐ | AlkLEᵥEᵥᵢ | | E_{f} |
| 1058 | E_{1b} | AlkLEᵥEᵥᵢ | | E_{f} |
| 1059 | E₁ₐEᵢ | AlkLEᵥEᵥᵢ | | E_{f} |
| 1060 | E_{1b}Eᵢ | AlkLEᵥEᵥᵢ | | E_{f} |
| 1061 | E₁ₐEᵢᵢ | AlkLEᵥEᵥᵢ | | E_{f} |
| 1062 | E_{1b}Eᵢᵢ | AlkLEᵥEᵥᵢ | | E_{f} |
| 1063 | E₁ₐEᵢᵢE_{iib} | AlkLEᵥEᵥᵢ | | E_{f} |
| 1064 | E_{1b}EᵢᵢE_{iib} | AlkLEᵥEᵥᵢ | | E_{f} |
| 1065 | E₁ₐE₄ | AlkLEᵥEᵥᵢ | | E_{f} |
| 1066 | E_{1b}E₄ | AlkLEᵥEᵥᵢ | | E_{f} |
| 1067 | E₁ₐEᵢE₄ | AlkLEᵥEᵥᵢ | | E_{f} |
| 1068 | E_{1b}EᵢE₄ | AlkLEᵥEᵥᵢ | | E_{f} |
| 1069 | E₁ₐEᵢᵢE₄ | AlkLEᵥEᵥᵢ | | E_{f} |
| 1070 | E_{1b}EᵢᵢE₄ | AlkLEᵥEᵥᵢ | | E_{f} |
| 1071 | E₁ₐEᵢᵢE_{iib}E₄ | AlkLEᵥEᵥᵢ | | E_{f} |
| 1072 | E_{1b}EᵢᵢE_{iib}E₄ | AlkLEᵥEᵥᵢ | | E_{f} |
| 1073 | E₁ₐEᵢᵢᵢ | AlkLEᵥEᵥᵢ | | E_{f} |
| 1074 | E_{1b}Eᵢᵢᵢ | AlkLEᵥEᵥᵢ | | E_{f} |
| 1075 | E₁ₐEᵢᵢᵢE₄ | AlkLEᵥEᵥᵢ | | E_{f} |
| 1076 | E_{1b}EᵢᵢᵢE₄ | AlkLEᵥEᵥᵢ | | E_{f} |
| 1077 | E₁ₐEᵢᵥ | AlkLEᵥEᵥᵢ | | E_{f} |
| 1078 | E_{1b}Eᵢᵥ | AlkLEᵥEᵥᵢ | | E_{f} |
| 1079 | E₁ₐEᵢᵥE₄ | AlkLEᵥEᵥᵢ | | E_{f} |
| 1080 | E_{1b}EᵢᵥE₄ | AlkLEᵥEᵥᵢ | | E_{f} |
| 1081 | E₁ₐ | AlkLEᵥEᵥᵢ | E₄* | E_{f} |
| 1082 | E_{1b} | AlkLEᵥEᵥᵢ | E₄* | E_{f} |
| 1083 | E₁ₐEᵢ | AlkLEᵥEᵥᵢ | E₄* | E_{f} |
| 1084 | E_{1b}Eᵢ | AlkLEᵥEᵥᵢ | E₄* | E_{f} |
| 1085 | E₁ₐEᵢᵢ | AlkLEᵥEᵥᵢ | E₄* | E_{f} |
| 1086 | E_{1b}Eᵢᵢ | AlkLEᵥEᵥᵢ | E₄* | E_{f} |
| 1087 | E₁ₐEᵢᵢE_{iib} | AlkLEᵥEᵥᵢ | E₄* | E_{f} |
| 1088 | E_{1b}EᵢᵢE_{iib} | AlkLEᵥEᵥᵢ | E₄* | E_{f} |
| 1089 | E₁ₐE₄ | AlkLEᵥEᵥᵢ | E₄* | E_{f} |
| 1090 | E_{1b}E₄ | AlkLEᵥEᵥᵢ | E₄* | E_{f} |
| 1091 | E₁ₐEᵢE₄ | AlkLEᵥEᵥᵢ | E₄* | E_{f} |
| 1092 | E_{1b}EᵢE₄ | AlkLEᵥEᵥᵢ | E₄* | E_{f} |
| 1093 | E₁ₐEᵢᵢE₄ | AlkLEᵥEᵥᵢ | E₄* | E_{f} |
| 1094 | E_{1b}EᵢᵢE₄ | AlkLEᵥEᵥᵢ | E₄* | E_{f} |
| 1095 | E₁ₐEᵢᵢE_{iib}E₄ | AlkLEᵥEᵥᵢ | E₄* | E_{f} |
| 1096 | E_{1b}EᵢᵢE_{iib}E₄ | AlkLEᵥEᵥᵢ | E₄* | E_{f} |
| 1097 | E₁ₐEᵢᵢᵢ | AlkLEᵥEᵥᵢ | E₄* | E_{f} |
| 1098 | E_{1b}Eᵢᵢᵢ | AlkLEᵥEᵥᵢ | E₄* | E_{f} |
| 1099 | E₁ₐEᵢᵢᵢE₄ | AlkLEᵥEᵥᵢ | E₄* | E_{f} |
| 1100 | E_{1b}EᵢᵢᵢE₄ | AlkLEᵥEᵥᵢ | E₄* | E_{f} |
| 1101 | E₁ₐEᵢᵥ | AlkLEᵥEᵥᵢ | E₄* | E_{f} |
| 1102 | E_{1b}Eᵢᵥ | AlkLEᵥEᵥᵢ | E₄* | E_{f} |
| 1103 | E₁ₐEᵢᵥE₄ | AlkLEᵥEᵥᵢ | E₄* | E_{f} |
| 1104 | E_{1b}EᵢᵥE₄ | AlkLEᵥEᵥᵢ | E₄* | E_{f} |
| 1105 | E₁ₐ | AlkLEᵥEᵥᵢ | E₅ | E_{f} |
| 1106 | E_{1b} | AlkLEᵥEᵥᵢ | E₅ | E_{f} |
| 1107 | E₁ₐEᵢ | AlkLEᵥEᵥᵢ | E₅ | E_{f} |
| 1108 | E_{1b}Eᵢ | AlkLEᵥEᵥᵢ | E₅ | E_{f} |
| 1109 | E₁ₐEᵢᵢ | AlkLEᵥEᵥᵢ | E₅ | E_{f} |
| 1110 | E_{1b}Eᵢᵢ | AlkLEᵥEᵥᵢ | E₅ | E_{f} |
| 1111 | E₁ₐEᵢᵢE_{iib} | AlkLEᵥEᵥᵢ | E₅ | E_{f} |
| 1112 | E_{1b}EᵢᵢE_{iib} | AlkLEᵥEᵥᵢ | E₅ | E_{f} |
| 1113 | E₁ₐE₄ | AlkLEᵥEᵥᵢ | E₅ | E_{f} |
| 1114 | E_{1b}E₄ | AlkLEᵥEᵥᵢ | E₅ | E_{f} |
| 1115 | E₁ₐEᵢE₄ | AlkLEᵥEᵥᵢ | E₅ | E_{f} |
| 1116 | E_{1b}EᵢE₄ | AlkLEᵥEᵥᵢ | E₅ | E_{f} |
| 1117 | E₁ₐEᵢᵢE₄ | AlkLEᵥEᵥᵢ | E₅ | E_{f} |
| 1118 | E_{1b}EᵢᵢE₄ | AlkLEᵥEᵥᵢ | E₅ | E_{f} |
| 1119 | E₁ₐEᵢᵢE_{iib}E₄ | AlkLEᵥEᵥᵢ | E₅ | E_{f} |
| 1120 | E_{1b}EᵢᵢE_{iib}E₄ | AlkLEᵥEᵥᵢ | E₅ | E_{f} |
| 1121 | E₁ₐEᵢᵢᵢ | AlkLEᵥEᵥᵢ | E₅ | E_{f} |
| 1122 | E_{1b}Eᵢᵢᵢ | AlkLEᵥEᵥᵢ | E₅ | E_{f} |
| 1123 | E₁ₐEᵢᵢᵢE₄ | AlkLEᵥEᵥᵢ | E₅ | E_{f} |
| 1124 | E_{1b}EᵢᵢᵢE₄ | AlkLEᵥEᵥᵢ | E₅ | E_{f} |
| 1125 | E₁ₐEᵢᵥ | AlkLEᵥEᵥᵢ | E₅ | E_{f} |
| 1126 | E_{1b}Eᵢᵥ | AlkLEᵥEᵥᵢ | E₅ | E_{f} |
| 1127 | E₁ₐEᵢᵥE₄ | AlkLEᵥEᵥᵢ | E₅ | E_{f} |
| 1128 | E_{1b}EᵢᵥE₄ | AlkLEᵥEᵥᵢ | E₅ | E_{f} |
| 1129 | E₁ₐ | AlkLEᵥEᵥᵢ | E₄*E₅ | E_{f} |
| 1130 | E_{1b} | AlkLEᵥEᵥᵢ | E₄*E₅ | E_{f} |
| 1131 | E₁ₐEᵢ | AlkLEᵥEᵥᵢ | E₄*E₅ | E_{f} |
| 1132 | E_{1b}Eᵢ | AlkLEᵥEᵥᵢ | E₄*E₅ | E_{f} |
| 1133 | E₁ₐEᵢᵢ | AlkLEᵥEᵥᵢ | E₄*E₅ | E_{f} |
| 1134 | E_{1b}Eᵢᵢ | AlkLEᵥEᵥᵢ | E₄*E₅ | E_{f} |
| 1135 | E₁ₐEᵢᵢE_{iib} | AlkLEᵥEᵥᵢ | E₄*E₅ | E_{f} |
| 1136 | E_{1b}EᵢᵢE_{iib} | AlkLEᵥEᵥᵢ | E₄*E₅ | E_{f} |
| 1137 | E₁ₐE₄ | AlkLEᵥEᵥᵢ | E₄*E₅ | E_{f} |
| 1138 | E_{1b}E₄ | AlkLEᵥEᵥᵢ | E₄*E₅ | E_{f} |
| 1139 | E₁ₐEᵢE₄ | AlkLEᵥEᵥᵢ | E₄*E₅ | E_{f} |
| 1140 | E_{1b}EᵢE₄ | AlkLEᵥEᵥᵢ | E₄*E₅ | E_{f} |
| 1141 | E₁ₐEᵢᵢE₄ | AlkLEᵥEᵥᵢ | E₄*E₅ | E_{f} |
| 1142 | E_{1b}EᵢᵢE₄ | AlkLEᵥEᵥᵢ | E₄*E₅ | E_{f} |
| 1143 | E₁ₐEᵢᵢE_{iib}E₄ | AlkLEᵥEᵥᵢ | E₄*E₅ | E_{f} |
| 1144 | E_{1b}EᵢᵢE_{iib}E₄ | AlkLEᵥEᵥᵢ | E₄*E₅ | E_{f} |
| 1145 | E₁ₐEᵢᵢᵢ | AlkLEᵥEᵥᵢ | E₄*E₅ | E_{f} |
| 1146 | E_{1b}Eᵢᵢᵢ | AlkLEᵥEᵥᵢ | E₄*E₅ | E_{f} |
| 1147 | E₁ₐEᵢᵢᵢE₄ | AlkLEᵥEᵥᵢ | E₄*E₅ | E_{f} |
| 1148 | E_{1b}EᵢᵢᵢE₄ | AlkLEᵥEᵥᵢ | E₄*E₅ | E_{f} |
| 1149 | E₁ₐEᵢᵥ | AlkLEᵥEᵥᵢ | E₄*E₅ | E_{f} |
| 1150 | E_{1b}Eᵢᵥ | AlkLEᵥEᵥᵢ | E₄*E₅ | E_{f} |
| 1151 | E₁ₐEᵢᵥE₄ | AlkLEᵥEᵥᵢ | E₄*E₅ | E_{f} |
| 1152 | E_{1b}EᵢᵥE₄ | AlkLEᵥEᵥᵢ | E₄*E₅ | E_{f} |
| 1153 | E₁ₐ | Eᵥᵢᵢ | | |
| 1154 | E_{1b} | Eᵥᵢᵢ | | |
| 1155 | E₁ₐEᵢ | Eᵥᵢᵢ | | |
| 1156 | E_{1b}Eᵢ | Eᵥᵢᵢ | | |
| 1157 | E₁ₐEᵢᵢ | Eᵥᵢᵢ | | |
| 1158 | E_{1b}Eᵢᵢ | Eᵥᵢᵢ | | |
| 1159 | E₁ₐEᵢᵢE_{iib} | Eᵥᵢᵢ | | |
| 1160 | E_{1b}EᵢᵢE_{iib} | Eᵥᵢᵢ | | |
| 1161 | E₁ₐE₄ | Eᵥᵢᵢ | | |
| 1162 | E_{1b}E₄ | Eᵥᵢᵢ | | |
| 1163 | E₁ₐEᵢE₄ | Eᵥᵢᵢ | | |
| 1164 | E_{1b}EᵢE₄ | Eᵥᵢᵢ | | |
| 1165 | E₁ₐEᵢᵢE₄ | Eᵥᵢᵢ | | |
| 1166 | E_{1b}EᵢᵢE₄ | Eᵥᵢᵢ | | |
| 1167 | E₁ₐEᵢᵢE_{iib}E₄ | Eᵥᵢᵢ | | |
| 1168 | E_{1b}EᵢᵢE_{iib}E₄ | Eᵥᵢᵢ | | |
| 1169 | E₁ₐEᵢᵢᵢ | Eᵥᵢᵢ | | |
| 1170 | E_{1b}Eᵢᵢᵢ | Eᵥᵢᵢ | | |
| 1171 | E₁ₐEᵢᵢᵢE₄ | Eᵥᵢᵢ | | |
| 1172 | E_{1b}EᵢᵢᵢE₄ | Eᵥᵢᵢ | | |
| 1173 | E₁ₐEᵢᵥ | Eᵥᵢᵢ | | |
| 1174 | E_{1b}Eᵢᵥ | Eᵥᵢᵢ | | |
| 1175 | E₁ₐEᵢᵥE₄ | Eᵥᵢᵢ | | |
| 1176 | E_{1b}EᵢᵥE₄ | Eᵥᵢᵢ | | |
| 1177 | E₁ₐ | Eᵥᵢᵢ | E₄* | |
| 1178 | E_{1b} | Eᵥᵢᵢ | E₄* | |
| 1179 | E₁ₐEᵢ | Eᵥᵢᵢ | E₄* | |
| 1180 | E_{1b}Eᵢ | Eᵥᵢᵢ | E₄* | |
| 1181 | E₁ₐEᵢᵢ | Eᵥᵢᵢ | E₄* | |
| 1182 | E_{1b}Eᵢᵢ | Eᵥᵢᵢ | E₄* | |
| 1183 | E₁ₐEᵢᵢE_{iib} | Eᵥᵢᵢ | E₄* | |
| 1184 | E_{1b}EᵢᵢE_{iib} | Eᵥᵢᵢ | E₄* | |
| 1185 | E₁ₐE₄ | Eᵥᵢᵢ | E₄* | |
| 1186 | E_{1b}E₄ | Eᵥᵢᵢ | E₄* | |
| 1187 | E₁ₐEᵢE₄ | Eᵥᵢᵢ | E₄* | |
| 1188 | E_{1b}EᵢE₄ | Eᵥᵢᵢ | E₄* | |
| 1189 | E₁ₐEᵢᵢE₄ | Eᵥᵢᵢ | E₄* | |
| 1190 | E_{1b}EᵢᵢE₄ | Eᵥᵢᵢ | E₄* | |
| 1191 | E₁ₐEᵢᵢE_{iib}E₄ | Eᵥᵢᵢ | E₄* | |
| 1192 | E_{1b}EᵢᵢE_{iib}E₄ | Eᵥᵢᵢ | E₄* | |
| 1193 | E₁ₐEᵢᵢᵢ | Eᵥᵢᵢ | E₄* | |
| 1194 | E_{1b}Eᵢᵢᵢ | Eᵥᵢᵢ | E₄* | |
| 1195 | E₁ₐEᵢᵢᵢE₄ | Eᵥᵢᵢ | E₄* | |
| 1196 | E_{1b}EᵢᵢᵢE₄ | Eᵥᵢᵢ | E₄* | |
| 1197 | E₁ₐEᵢᵥ | Eᵥᵢᵢ | E₄* | |
| 1198 | E_{1b}Eᵢᵥ | Eᵥᵢᵢ | E₄* | |
| 1199 | E₁ₐEᵢᵥE₄ | Eᵥᵢᵢ | E₄* | |
| 1200 | E_{1b}EᵢᵥE₄ | Eᵥᵢᵢ | E₄* | |
| 1201 | E₁ₐ | Eᵥᵢᵢ | E₅ | |
| 1202 | E_{1b} | Eᵥᵢᵢ | E₅ | |
| 1203 | E₁ₐEᵢ | Eᵥᵢᵢ | E₅ | |
| 1204 | E_{1b}Eᵢ | Eᵥᵢᵢ | E₅ | |
| 1205 | E₁ₐEᵢᵢ | Eᵥᵢᵢ | E₅ | |
| 1206 | E_{1b}Eᵢᵢ | Eᵥᵢᵢ | E₅ | |
| 1207 | E₁ₐEᵢᵢE_{iib} | Eᵥᵢᵢ | E₅ | |
| 1208 | E_{1b}EᵢᵢE_{iib} | Eᵥᵢᵢ | E₅ | |
| 1209 | E₁ₐE₄ | Eᵥᵢᵢ | E₅ | |
| 1210 | E_{1b}E₄ | Eᵥᵢᵢ | E₅ | |
| 1211 | E₁ₐEᵢE₄ | Eᵥᵢᵢ | E₅ | |
| 1212 | E_{1b}EᵢE₄ | Eᵥᵢᵢ | E₅ | |
| 1213 | E₁ₐEᵢᵢE₄ | Eᵥᵢᵢ | E₅ | |
| 1214 | E_{1b}EᵢᵢE₄ | Eᵥᵢᵢ | E₅ | |
| 1215 | E₁ₐEᵢᵢE_{iib}E₄ | Eᵥᵢᵢ | E₅ | |
| 1216 | E_{1b}EᵢᵢE_{iib}E₄ | Eᵥᵢᵢ | E₅ | |
| 1217 | E₁ₐEᵢᵢᵢ | Eᵥᵢᵢ | E₅ | |
| 1218 | E_{1b}Eᵢᵢᵢ | Eᵥᵢᵢ | E₅ | |
| 1219 | E₁ₐEᵢᵢᵢE₄ | Eᵥᵢᵢ | E₅ | |
| 1220 | E_{1b}EᵢᵢᵢE₄ | Eᵥᵢᵢ | E₅ | |
| 1221 | E₁ₐEᵢᵥ | Eᵥᵢᵢ | E₅ | |
| 1222 | E_{1b}Eᵢᵥ | Eᵥᵢᵢ | E₅ | |
| 1223 | E₁ₐEᵢᵥE₄ | Eᵥᵢᵢ | E₅ | |
| 1224 | E_{1b}EᵢᵥE₄ | Eᵥᵢᵢ | E₅ | |
| 1225 | E₁ₐ | Eᵥᵢᵢ | E₄*E₅ | |
| 1226 | E_{1b} | Eᵥᵢᵢ | E₄*E₅ | |
| 1227 | E₁ₐEᵢ | Eᵥᵢᵢ | E₄*E₅ | |
| 1228 | E_{1b}Eᵢ | Eᵥᵢᵢ | E₄*E₅ | |
| 1229 | E₁ₐEᵢᵢ | Eᵥᵢᵢ | E₄*E₅ | |
| 1230 | E_{1b}Eᵢᵢ | Eᵥᵢᵢ | E₄*E₅ | |
| 1231 | E₁ₐEᵢᵢE_{iib} | Eᵥᵢᵢ | E₄*E₅ | |
| 1232 | E_{1b}EᵢᵢE_{iib} | Eᵥᵢᵢ | E₄*E₅ | |
| 1233 | E₁ₐE₄ | Eᵥᵢᵢ | E₄*E₅ | |
| 1234 | E_{1b}E₄ | Eᵥᵢᵢ | E₄*E₅ | |
| 1235 | E₁ₐEᵢE₄ | Eᵥᵢᵢ | E₄*E₅ | |
| 1236 | E_{1b}EᵢE₄ | Eᵥᵢᵢ | E₄*E₅ | |
| 1237 | E₁ₐEᵢᵢE₄ | Eᵥᵢᵢ | E₄*E₅ | |
| 1238 | E_{1b}EᵢᵢE₄ | Eᵥᵢᵢ | E₄*E₅ | |
| 1239 | E₁ₐEᵢᵢE_{iib}E₄ | Eᵥᵢᵢ | E₄*E₅ | |
| 1240 | E_{1b}EᵢᵢE_{iib}E₄ | Eᵥᵢᵢ | E₄*E₅ | |
| 1241 | E₁ₐEᵢᵢᵢ | Eᵥᵢᵢ | E₄*E₅ | |
| 1242 | E_{1b}Eᵢᵢᵢ | Eᵥᵢᵢ | E₄*E₅ | |
| 1243 | E₁ₐEᵢᵢᵢE₄ | Eᵥᵢᵢ | E₄*E₅ | |
| 1244 | E_{1b}EᵢᵢᵢE₄ | Eᵥᵢᵢ | E₄*E₅ | |
| 1245 | E₁ₐEᵢᵥ | Eᵥᵢᵢ | E₄*E₅ | |
| 1246 | E_{1b}Eᵢᵥ | Eᵥᵢᵢ | E₄*E₅ | |
| 1247 | E₁ₐEᵢᵥE₄ | Eᵥᵢᵢ | E₄*E₅ | |
| 1248 | E_{1b}EᵢᵥE₄ | Eᵥᵢᵢ | E₄*E₅ | |
| 1249 | E₁ₐ | AlkLEᵥᵢᵢ | | |
| 1250 | E_{1b} | AlkLEᵥᵢᵢ | | |
| 1251 | E₁ₐEᵢ | AlkLEᵥᵢᵢ | | |
| 1252 | E_{1b}Eᵢ | AlkLEᵥᵢᵢ | | |
| 1253 | E₁ₐEᵢᵢ | AlkLEᵥᵢᵢ | | |
| 1254 | E_{1b}Eᵢᵢ | AlkLEᵥᵢᵢ | | |
| 1255 | E₁ₐEᵢᵢE_{iib} | AlkLEᵥᵢᵢ | | |
| 1256 | E_{1b}EᵢᵢE_{iib} | AlkLEᵥᵢᵢ | | |
| 1257 | E₁ₐE₄ | AlkLEᵥᵢᵢ | | |
| 1258 | E_{1b}E₄ | AlkLEᵥᵢᵢ | | |
| 1259 | E₁ₐEᵢE₄ | AlkLEᵥᵢᵢ | | |
| 1260 | E_{1b}EᵢE₄ | AlkLEᵥᵢᵢ | | |
| 1261 | E₁ₐEᵢᵢE₄ | AlkLEᵥᵢᵢ | | |
| 1262 | E_{1b}EᵢᵢE₄ | AlkLEᵥᵢᵢ | | |
| 1263 | E₁ₐEᵢᵢE_{iib}E₄ | AlkLEᵥᵢᵢ | | |
| 1264 | E_{1b}EᵢᵢE_{iib}E₄ | AlkLEᵥᵢᵢ | | |
| 1265 | E₁ₐEᵢᵢᵢ | AlkLEᵥᵢᵢ | | |
| 1266 | E_{1b}Eᵢᵢᵢ | AlkLEᵥᵢᵢ | | |
| 1267 | E₁ₐEᵢᵢᵢE₄ | AlkLEᵥᵢᵢ | | |
| 1268 | E_{1b}EᵢᵢᵢE₄ | AlkLEᵥᵢᵢ | | |
| 1269 | E₁ₐEᵢᵥ | AlkLEᵥᵢᵢ | | |
| 1270 | E_{1b}Eᵢᵥ | AlkLEᵥᵢᵢ | | |
| 1271 | E₁ₐEᵢᵥE₄ | AlkLEᵥᵢᵢ | | |
| 1272 | E_{1b}EᵢᵥE₄ | AlkLEᵥᵢᵢ | | |
| 1273 | E₁ₐ | AlkLEᵥᵢᵢ | E₄* | |
| 1274 | E_{1b} | AlkLEᵥᵢᵢ | E₄* | |
| 1275 | E₁ₐEᵢ | AlkLEᵥᵢᵢ | E₄* | |
| 1276 | E_{1b}Eᵢ | AlkLEᵥᵢᵢ | E₄* | |
| 1277 | E₁ₐEᵢᵢ | AlkLEᵥᵢᵢ | E₄* | |
| 1278 | E_{1b}Eᵢᵢ | AlkLEᵥᵢᵢ | E₄* | |
| 1279 | E₁ₐEᵢᵢE_{iib} | AlkLEᵥᵢᵢ | E₄* | |
| 1280 | E_{1b}EᵢᵢE_{iib} | AlkLEᵥᵢᵢ | E₄* | |
| 1281 | E₁ₐE₄ | AlkLEᵥᵢᵢ | E₄* | |
| 1282 | E_{1b}E₄ | AlkLEᵥᵢᵢ | E₄* | |
| 1283 | E₁ₐEᵢE₄ | AlkLEᵥᵢᵢ | E₄* | |
| 1284 | E_{1b}EᵢE₄ | AlkLEᵥᵢᵢ | E₄* | |
| 1285 | E₁ₐEᵢᵢE₄ | AlkLEᵥᵢᵢ | E₄* | |
| 1286 | E_{1b}EᵢᵢE₄ | AlkLEᵥᵢᵢ | E₄* | |
| 1287 | E₁ₐEᵢᵢE_{iib}E₄ | AlkLEᵥᵢᵢ | E₄* | |
| 1288 | E_{1b}EᵢᵢE_{iib}E₄ | AlkLEᵥᵢᵢ | E₄* | |
| 1289 | E₁ₐEᵢᵢᵢ | AlkLEᵥᵢᵢ | E₄* | |
| 1290 | E_{1b}Eᵢᵢᵢ | AlkLEᵥᵢᵢ | E₄* | |
| 1291 | E₁ₐEᵢᵢᵢE₄ | AlkLEᵥᵢᵢ | E₄* | |
| 1292 | E_{1b}EᵢᵢᵢE₄ | AlkLEᵥᵢᵢ | E₄* | |
| 1293 | E₁ₐEᵢᵥ | AlkLEᵥᵢᵢ | E₄* | |
| 1294 | E_{1b}Eᵢᵥ | AlkLEᵥᵢᵢ | E₄* | |
| 1295 | E₁ₐEᵢᵥE₄ | AlkLEᵥᵢᵢ | E₄* | |
| 1296 | E_{1b}EᵢᵥE₄ | AlkLEᵥᵢᵢ | E₄* | |
| 1297 | E₁ₐ | AlkLEᵥᵢᵢ | E₅ | |
| 1298 | E_{1b} | AlkLEᵥᵢᵢ | E₅ | |
| 1299 | E₁ₐEᵢ | AlkLEᵥᵢᵢ | E₅ | |
| 1300 | E_{1b}Eᵢ | AlkLEᵥᵢᵢ | E₅ | |
| 1301 | E₁ₐEᵢᵢ | AlkLEᵥᵢᵢ | E₅ | |
| 1302 | E_{1b}Eᵢᵢ | AlkLEᵥᵢᵢ | E₅ | |
| 1303 | E₁ₐEᵢᵢE_{iib} | AlkLEᵥᵢᵢ | E₅ | |
| 1304 | E_{1b}EᵢᵢE_{iib} | AlkLEᵥᵢᵢ | E₅ | |
| 1305 | E₁ₐE₄ | AlkLEᵥᵢᵢ | E₅ | |
| 1306 | E_{1b}E₄ | AlkLEᵥᵢᵢ | E₅ | |
| 1307 | E₁ₐEᵢE₄ | AlkLEᵥᵢᵢ | E₅ | |
| 1308 | E_{1b}EᵢE₄ | AlkLEᵥᵢᵢ | E₅ | |
| 1309 | E₁ₐEᵢᵢE₄ | AlkLEᵥᵢᵢ | E₅ | |
| 1310 | E_{1b}EᵢᵢE₄ | AlkLEᵥᵢᵢ | E₅ | |
| 1311 | E₁ₐEᵢᵢE_{iib}E₄ | AlkLEᵥᵢᵢ | E₅ | |
| 1312 | E_{1b}EᵢᵢE_{iib}E₄ | AlkLEᵥᵢᵢ | E₅ | |
| 1313 | E₁ₐEᵢᵢᵢ | AlkLEᵥᵢᵢ | E₅ | |
| 1314 | E_{1b}Eᵢᵢᵢ | AlkLEᵥᵢᵢ | E₅ | |
| 1315 | E₁ₐEᵢᵢᵢE₄ | AlkLEᵥᵢᵢ | E₅ | |
| 1316 | E_{1b}EᵢᵢᵢE₄ | AlkLEᵥᵢᵢ | E₅ | |
| 1317 | E₁ₐEᵢᵥ | AlkLEᵥᵢᵢ | E₅ | |
| 1318 | E_{1b}Eᵢᵥ | AlkLEᵥᵢᵢ | E₅ | |
| 1319 | E₁ₐEᵢᵥE₄ | AlkLEᵥᵢᵢ | E₅ | |
| 1320 | E_{1b}EᵢᵥE₄ | AlkLEᵥᵢᵢ | E₅ | |
| 1321 | E₁ₐ | AlkLEᵥᵢᵢ | E₄*E₅ | |
| 1322 | E_{1b} | AlkLEᵥᵢᵢ | E₄*E₅ | |
| 1323 | E₁ₐEᵢ | AlkLEᵥᵢᵢ | E₄*E₅ | |
| 1324 | E_{1b}Eᵢ | AlkLEᵥᵢᵢ | E₄*E₅ | |
| 1325 | E₁ₐEᵢᵢ | AlkLEᵥᵢᵢ | E₄*E₅ | |
| 1326 | E_{1b}Eᵢᵢ | AlkLEᵥᵢᵢ | E₄*E₅ | |
| 1327 | E₁ₐEᵢᵢE_{iib} | AlkLEᵥᵢᵢ | E₄*E₅ | |
| 1328 | E_{1b}EᵢᵢE_{iib} | AlkLEᵥᵢᵢ | E₄*E₅ | |
| 1329 | E₁ₐE₄ | AlkLEᵥᵢᵢ | E₄*E₅ | |
| 1330 | E_{1b}E₄ | AlkLEᵥᵢᵢ | E₄*E₅ | |
| 1331 | E₁ₐEᵢE₄ | AlkLEᵥᵢᵢ | E₄*E₅ | |
| 1332 | E_{1b}EᵢE₄ | AlkLEᵥᵢᵢ | E₄*E₅ | |
| 1333 | E₁ₐEᵢᵢE₄ | AlkLEᵥᵢᵢ | E₄*E₅ | |
| 1334 | E_{1b}EᵢᵢE₄ | AlkLEᵥᵢᵢ | E₄*E₅ | |
| 1335 | E₁ₐEᵢᵢE_{iib}E₄ | AlkLEᵥᵢᵢ | E₄*E₅ | |
| 1336 | E_{1b}EᵢᵢE_{iib}E₄ | AlkLEᵥᵢᵢ | E₄*E₅ | |
| 1337 | E₁ₐEᵢᵢᵢ | AlkLEᵥᵢᵢ | E₄*E₅ | |
| 1338 | E_{1b}Eᵢᵢᵢ | AlkLEᵥᵢᵢ | E₄*E₅ | |
| 1339 | E₁ₐEᵢᵢᵢE₄ | AlkLEᵥᵢᵢ | E₄*E₅ | |
| 1340 | E_{1b}EᵢᵢᵢE₄ | AlkLEᵥᵢᵢ | E₄*E₅ | |
| 1341 | E₁ₐEᵢᵥ | AlkLEᵥᵢᵢ | E₄*E₅ | |
| 1342 | E_{1b}Eᵢᵥ | AlkLEᵥᵢᵢ | E₄*E₅ | |
| 1343 | E₁ₐEᵢᵥE₄ | AlkLEᵥᵢᵢ | E₄*E₅ | |
| 1344 | E_{1b}EᵢᵥE₄ | AlkLEᵥᵢᵢ | E₄*E₅ | |
| 1345 | E₁ₐ | Eᵥᵢᵢ | | Eₐ |
| 1346 | E_{1b} | Eᵥᵢᵢ | | Eₐ |
| 1347 | E₁ₐEᵢ | Eᵥᵢᵢ | | Eₐ |
| 1348 | E_{1b}Eᵢ | Eᵥᵢᵢ | | Eₐ |
| 1349 | E₁ₐEᵢᵢ | Eᵥᵢᵢ | | Eₐ |
| 1350 | E_{1b}Eᵢᵢ | Eᵥᵢᵢ | | Eₐ |
| 1351 | E₁ₐEᵢᵢE_{iib} | Eᵥᵢᵢ | | Eₐ |
| 1352 | E_{1b}EᵢᵢE_{iib} | Eᵥᵢᵢ | | Eₐ |
| 1353 | E₁ₐE₄ | Eᵥᵢᵢ | | Eₐ |
| 1354 | E_{1b}E₄ | Eᵥᵢᵢ | | Eₐ |
| 1355 | E₁ₐEᵢE₄ | Eᵥᵢᵢ | | Eₐ |
| 1356 | E_{1b}EᵢE₄ | Eᵥᵢᵢ | | Eₐ |
| 1357 | E₁ₐEᵢᵢE₄ | Eᵥᵢᵢ | | Eₐ |
| 1358 | E_{1b}EᵢᵢE₄ | Eᵥᵢᵢ | | Eₐ |
| 1359 | E₁ₐEᵢᵢE_{iib}E₄ | Eᵥᵢᵢ | | Eₐ |
| 1360 | E_{1b}EᵢᵢE_{iib}E₄ | Eᵥᵢᵢ | | Eₐ |
| 1361 | E₁ₐEᵢᵢᵢ | Eᵥᵢᵢ | | Eₐ |
| 1362 | E_{1b}Eᵢᵢᵢ | Eᵥᵢᵢ | | Eₐ |
| 1363 | E₁ₐEᵢᵢᵢE₄ | Eᵥᵢᵢ | | Eₐ |
| 1364 | E_{1b}EᵢᵢᵢE₄ | Eᵥᵢᵢ | | Eₐ |
| 1365 | E₁ₐEᵢᵥ | Eᵥᵢᵢ | | Eₐ |
| 1366 | E_{1b}Eᵢᵥ | Eᵥᵢᵢ | | Eₐ |
| 1367 | E₁ₐEᵢᵥE₄ | Eᵥᵢᵢ | | Eₐ |
| 1368 | E_{1b}EᵢᵥE₄ | Eᵥᵢᵢ | | Eₐ |
| 1369 | E₁ₐ | Eᵥᵢᵢ | E₄* | Eₐ |
| 1370 | E_{1b} | Eᵥᵢᵢ | E₄* | Eₐ |
| 1371 | E₁ₐEᵢ | Eᵥᵢᵢ | E₄* | Eₐ |
| 1372 | E_{1b}Eᵢ | Eᵥᵢᵢ | E₄* | Eₐ |
| 1373 | E₁ₐEᵢᵢ | Eᵥᵢᵢ | E₄* | Eₐ |
| 1374 | E_{1b}Eᵢᵢ | Eᵥᵢᵢ | E₄* | Eₐ |
| 1375 | E₁ₐEᵢᵢE_{iib} | Eᵥᵢᵢ | E₄* | Eₐ |
| 1376 | E_{1b}EᵢᵢE_{iib} | Eᵥᵢᵢ | E₄* | Eₐ |
| 1377 | E₁ₐE₄ | Eᵥᵢᵢ | E₄* | Eₐ |
| 1378 | E_{1b}E₄ | Eᵥᵢᵢ | E₄* | Eₐ |
| 1379 | E₁ₐEᵢE₄ | Eᵥᵢᵢ | E₄* | Eₐ |
| 1380 | E_{1b}EᵢE₄ | Eᵥᵢᵢ | E₄* | Eₐ |
| 1381 | E₁ₐEᵢᵢE₄ | Eᵥᵢᵢ | E₄* | Eₐ |
| 1382 | E_{1b}EᵢᵢE₄ | Eᵥᵢᵢ | E₄* | Eₐ |
| 1383 | E₁ₐEᵢᵢE_{iib}E₄ | Eᵥᵢᵢ | E₄* | Eₐ |
| 1384 | E_{1b}EᵢᵢE_{iib}E₄ | Eᵥᵢᵢ | E₄* | Eₐ |
| 1385 | E₁ₐEᵢᵢᵢ | Eᵥᵢᵢ | E₄* | Eₐ |
| 1386 | E_{1b}Eᵢᵢᵢ | Eᵥᵢᵢ | E₄* | Eₐ |
| 1387 | E₁ₐEᵢᵢᵢE₄ | Eᵥᵢᵢ | E₄* | Eₐ |
| 1388 | E_{1b}EᵢᵢᵢE₄ | Eᵥᵢᵢ | E₄* | Eₐ |
| 1389 | E₁ₐEᵢᵥ | Eᵥᵢᵢ | E₄* | Eₐ |
| 1390 | E_{1b}Eᵢᵥ | Eᵥᵢᵢ | E₄* | Eₐ |
| 1391 | E₁ₐEᵢᵥE₄ | Eᵥᵢᵢ | E₄* | Eₐ |
| 1392 | E_{1b}EᵢᵥE₄ | Eᵥᵢᵢ | E₄* | Eₐ |
| 1393 | E₁ₐ | Eᵥᵢᵢ | E₅ | Eₐ |
| 1394 | E_{1b} | Eᵥᵢᵢ | E₅ | Eₐ |
| 1395 | E₁ₐEᵢ | Eᵥᵢᵢ | E₅ | Eₐ |
| 1396 | E_{1b}Eᵢ | Eᵥᵢᵢ | E₅ | Eₐ |
| 1397 | E₁ₐEᵢᵢ | Eᵥᵢᵢ | E₅ | Eₐ |
| 1398 | E_{1b}Eᵢᵢ | Eᵥᵢᵢ | E₅ | Eₐ |
| 1399 | E₁ₐEᵢᵢE_{iib} | Eᵥᵢᵢ | E₅ | Eₐ |
| 1400 | E_{1b}EᵢᵢE_{iib} | Eᵥᵢᵢ | E₅ | Eₐ |
| 1401 | E₁ₐE₄ | Eᵥᵢᵢ | E₅ | Eₐ |
| 1402 | E_{1b}E₄ | Eᵥᵢᵢ | E₅ | Eₐ |
| 1403 | E₁ₐEᵢE₄ | Eᵥᵢᵢ | E₅ | Eₐ |
| 1404 | E_{1b}EᵢE₄ | Eᵥᵢᵢ | E₅ | Eₐ |
| 1405 | E₁ₐEᵢᵢE₄ | Eᵥᵢᵢ | E₅ | Eₐ |
| 1406 | E_{1b}EᵢᵢE₄ | Eᵥᵢᵢ | E₅ | Eₐ |
| 1407 | E₁ₐEᵢᵢE_{iib}E₄ | Eᵥᵢᵢ | E₅ | Eₐ |
| 1408 | E_{1b}EᵢᵢE_{iib}E₄ | Eᵥᵢᵢ | E₅ | Eₐ |
| 1409 | E₁ₐEᵢᵢᵢ | Eᵥᵢᵢ | E₅ | Eₐ |
| 1410 | E_{1b}Eᵢᵢᵢ | Eᵥᵢᵢ | E₅ | Eₐ |
| 1411 | E₁ₐEᵢᵢᵢE₄ | Eᵥᵢᵢ | E₅ | Eₐ |
| 1412 | E_{1b}EᵢᵢᵢE₄ | Eᵥᵢᵢ | E₅ | Eₐ |
| 1413 | E₁ₐEᵢᵥ | Eᵥᵢᵢ | E₅ | Eₐ |
| 1414 | E_{1b}Eᵢᵥ | Eᵥᵢᵢ | E₅ | Eₐ |
| 1415 | E₁ₐEᵢᵥE₄ | Eᵥᵢᵢ | E₅ | Eₐ |
| 1416 | E_{1b}EᵢᵥE₄ | Eᵥᵢᵢ | E₅ | Eₐ |
| 1417 | E₁ₐ | Eᵥᵢᵢ | E₄*E₅ | Eₐ |
| 1418 | E_{1b} | Eᵥᵢᵢ | E₄*E₅ | Eₐ |
| 1419 | E₁ₐEᵢ | Eᵥᵢᵢ | E₄*E₅ | Eₐ |
| 1420 | E_{1b}Eᵢ | Eᵥᵢᵢ | E₄*E₅ | Eₐ |
| 1421 | E₁ₐEᵢᵢ | Eᵥᵢᵢ | E₄*E₅ | Eₐ |
| 1422 | E_{1b}Eᵢᵢ | Eᵥᵢᵢ | E₄*E₅ | Eₐ |
| 1423 | E₁ₐEᵢᵢE_{iib} | Eᵥᵢᵢ | E₄*E₅ | Eₐ |
| 1424 | E_{1b}EᵢᵢE_{iib} | Eᵥᵢᵢ | E₄*E₅ | Eₐ |
| 1425 | E₁ₐE₄ | Eᵥᵢᵢ | E₄*E₅ | Eₐ |
| 1426 | E_{1b}E₄ | Eᵥᵢᵢ | E₄*E₅ | Eₐ |
| 1427 | E₁ₐEᵢE₄ | Eᵥᵢᵢ | E₄*E₅ | Eₐ |
| 1428 | E_{1b}EᵢE₄ | Eᵥᵢᵢ | E₄*E₅ | Eₐ |
| 1429 | E₁ₐEᵢᵢE₄ | Eᵥᵢᵢ | E₄*E₅ | Eₐ |
| 1430 | E_{1b}EᵢᵢE₄ | Eᵥᵢᵢ | E₄*E₅ | Eₐ |
| 1431 | E₁ₐEᵢᵢE_{iib}E₄ | Eᵥᵢᵢ | E₄*E₅ | Eₐ |
| 1432 | E_{1b}EᵢᵢE_{iib}E₄ | Eᵥᵢᵢ | E₄*E₅ | Eₐ |
| 1433 | E₁ₐEᵢᵢᵢ | Eᵥᵢᵢ | E₄*E₅ | Eₐ |
| 1434 | E_{1b}Eᵢᵢᵢ | Eᵥᵢᵢ | E₄*E₅ | Eₐ |
| 1435 | E₁ₐEᵢᵢᵢE₄ | Eᵥᵢᵢ | E₄*E₅ | Eₐ |
| 1436 | E_{1b}EᵢᵢᵢE₄ | Eᵥᵢᵢ | E₄*E₅ | Eₐ |
| 1437 | E₁ₐEᵢᵥ | Eᵥᵢᵢ | E₄*E₅ | Eₐ |
| 1438 | E_{1b}Eᵢᵥ | Eᵥᵢᵢ | E₄*E₅ | Eₐ |
| 1439 | E₁ₐEᵢᵥE₄ | Eᵥᵢᵢ | E₄*E₅ | Eₐ |
| 1440 | E_{1b}EᵢᵥE₄ | Eᵥᵢᵢ | E₄*E₅ | Eₐ |
| 1441 | E₁ₐ | AlkLEᵥᵢᵢ | | Eₐ |
| 1442 | E_{1b} | AlkLEᵥᵢᵢ | | Eₐ |
| 1443 | E₁ₐEᵢ | AlkLEᵥᵢᵢ | | Eₐ |
| 1444 | E_{1b}Eᵢ | AlkLEᵥᵢᵢ | | Eₐ |
| 1445 | E₁ₐEᵢᵢ | AlkLEᵥᵢᵢ | | Eₐ |
| 1446 | E_{1b}Eᵢᵢ | AlkLEᵥᵢᵢ | | Eₐ |
| 1447 | E₁ₐEᵢᵢE_{iib} | AlkLEᵥᵢᵢ | | Eₐ |
| 1448 | E_{1b}EᵢᵢE_{iib} | AlkLEᵥᵢᵢ | | Eₐ |
| 1449 | E₁ₐE₄ | AlkLEᵥᵢᵢ | | Eₐ |
| 1450 | E_{1b}E₄ | AlkLEᵥᵢᵢ | | Eₐ |
| 1451 | E₁ₐEᵢE₄ | AlkLEᵥᵢᵢ | | Eₐ |
| 1452 | E_{1b}EᵢE₄ | AlkLEᵥᵢᵢ | | Eₐ |
| 1453 | E₁ₐEᵢᵢE₄ | AlkLEᵥᵢᵢ | | Eₐ |
| 1454 | E_{1b}EᵢᵢE₄ | AlkLEᵥᵢᵢ | | Eₐ |
| 1455 | E₁ₐEᵢᵢE_{iib}E₄ | AlkLEᵥᵢᵢ | | Eₐ |
| 1456 | E_{1b}EᵢᵢE_{iib}E₄ | AlkLEᵥᵢᵢ | | Eₐ |
| 1457 | E₁ₐEᵢᵢᵢ | AlkLEᵥᵢᵢ | | Eₐ |
| 1458 | E_{1b}Eᵢᵢᵢ | AlkLEᵥᵢᵢ | | Eₐ |
| 1459 | E₁ₐEᵢᵢᵢE₄ | AlkLEᵥᵢᵢ | | Eₐ |
| 1460 | E_{1b}EᵢᵢᵢE₄ | AlkLEᵥᵢᵢ | | Eₐ |
| 1461 | E₁ₐEᵢᵥ | AlkLEᵥᵢᵢ | | Eₐ |
| 1462 | E_{1b}Eᵢᵥ | AlkLEᵥᵢᵢ | | Eₐ |
| 1463 | E₁ₐEᵢᵥE₄ | AlkLEᵥᵢᵢ | | Eₐ |
| 1464 | E_{1b}EᵢᵥE₄ | AlkLEᵥᵢᵢ | | Eₐ |
| 1465 | E₁ₐ | AlkLEᵥᵢᵢ | E₄* | Eₐ |
| 1466 | E_{1b} | AlkLEᵥᵢᵢ | E₄* | Eₐ |
| 1467 | E₁ₐEᵢ | AlkLEᵥᵢᵢ | E₄* | Eₐ |
| 1468 | E_{1b}Eᵢ | AlkLEᵥᵢᵢ | E₄* | Eₐ |
| 1469 | E₁ₐEᵢᵢ | AlkLEᵥᵢᵢ | E₄* | Eₐ |
| 1470 | E_{1b}Eᵢᵢ | AlkLEᵥᵢᵢ | E₄* | Eₐ |
| 1471 | E₁ₐEᵢᵢE_{iib} | AlkLEᵥᵢᵢ | E₄* | Eₐ |
| 1472 | E_{1b}EᵢᵢE_{iib} | AlkLEᵥᵢᵢ | E₄* | Eₐ |
| 1473 | E₁ₐE₄ | AlkLEᵥᵢᵢ | E₄* | Eₐ |
| 1474 | E_{1b}E₄ | AlkLEᵥᵢᵢ | E₄* | Eₐ |
| 1475 | E₁ₐEᵢE₄ | AlkLEᵥᵢᵢ | E₄* | Eₐ |
| 1476 | E_{1b}EᵢE₄ | AlkLEᵥᵢᵢ | E₄* | Eₐ |
| 1477 | E₁ₐEᵢᵢE₄ | AlkLEᵥᵢᵢ | E₄* | Eₐ |
| 1478 | E_{1b}EᵢᵢE₄ | AlkLEᵥᵢᵢ | E₄* | Eₐ |
| 1479 | E₁ₐEᵢᵢE_{iib}E₄ | AlkLEᵥᵢᵢ | E₄* | Eₐ |
| 1480 | E_{1b}EᵢᵢE_{iib}E₄ | AlkLEᵥᵢᵢ | E₄* | Eₐ |
| 1481 | E₁ₐEᵢᵢᵢ | AlkLEᵥᵢᵢ | E₄* | Eₐ |
| 1482 | E_{1b}Eᵢᵢᵢ | AlkLEᵥᵢᵢ | E₄* | Eₐ |
| 1483 | E₁ₐEᵢᵢᵢE₄ | AlkLEᵥᵢᵢ | E₄* | Eₐ |
| 1484 | E_{1b}EᵢᵢᵢE₄ | AlkLEᵥᵢᵢ | E₄* | Eₐ |
| 1485 | E₁ₐEᵢᵥ | AlkLEᵥᵢᵢ | E₄* | Eₐ |
| 1486 | E_{1b}Eᵢᵥ | AlkLEᵥᵢᵢ | E₄* | Eₐ |
| 1487 | E₁ₐEᵢᵥE₄ | AlkLEᵥᵢᵢ | E₄* | Eₐ |
| 1488 | E_{1b}EᵢᵥE₄ | AlkLEᵥᵢᵢ | E₄* | Eₐ |
| 1489 | E₁ₐ | AlkLEᵥᵢᵢ | E₅ | Eₐ |
| 1490 | E_{1b} | AlkLEᵥᵢᵢ | E₅ | Eₐ |
| 1491 | E₁ₐEᵢ | AlkLEᵥᵢᵢ | E₅ | Eₐ |
| 1492 | E_{1b}Eᵢ | AlkLEᵥᵢᵢ | E₅ | Eₐ |
| 1493 | E₁ₐEᵢᵢ | AlkLEᵥᵢᵢ | E₅ | Eₐ |
| 1494 | E_{1b}Eᵢᵢ | AlkLEᵥᵢᵢ | E₅ | Eₐ |
| 1495 | E₁ₐEᵢᵢE_{iib} | AlkLEᵥᵢᵢ | E₅ | Eₐ |
| 1496 | E_{1b}EᵢᵢE_{iib} | AlkLEᵥᵢᵢ | E₅ | Eₐ |
| 1497 | E₁ₐE₄ | AlkLEᵥᵢᵢ | E₅ | Eₐ |
| 1498 | E_{1b}E₄ | AlkLEᵥᵢᵢ | E₅ | Eₐ |
| 1499 | E₁ₐEᵢE₄ | AlkLEᵥᵢᵢ | E₅ | Eₐ |
| 1500 | E_{1b}EᵢE₄ | AlkLEᵥᵢᵢ | E₅ | Eₐ |
| 1501 | E₁ₐEᵢᵢE₄ | AlkLEᵥᵢᵢ | E₅ | Eₐ |
| 1502 | E_{1b}EᵢᵢE₄ | AlkLEᵥᵢᵢ | E₅ | Eₐ |
| 1503 | E₁ₐEᵢᵢE_{iib}E₄ | AlkLEᵥᵢᵢ | E₅ | Eₐ |
| 1504 | E_{1b}EᵢᵢE_{iib}E₄ | AlkLEᵥᵢᵢ | E₅ | Eₐ |
| 1505 | E₁ₐEᵢᵢᵢ | AlkLEᵥᵢᵢ | E₅ | Eₐ |
| 1506 | E_{1b}Eᵢᵢᵢ | AlkLEᵥᵢᵢ | E₅ | Eₐ |
| 1507 | E₁ₐEᵢᵢᵢE₄ | AlkLEᵥᵢᵢ | E₅ | Eₐ |
| 1508 | E_{1b}EᵢᵢᵢE₄ | AlkLEᵥᵢᵢ | E₅ | Eₐ |
| 1509 | E₁ₐEᵢᵥ | AlkLEᵥᵢᵢ | E₅ | Eₐ |
| 1510 | E_{1b}Eᵢᵥ | AlkLEᵥᵢᵢ | E₅ | Eₐ |
| 1511 | E₁ₐEᵢᵥE₄ | AlkLEᵥᵢᵢ | E₅ | Eₐ |
| 1512 | E_{1b}EᵢᵥE₄ | AlkLEᵥᵢᵢ | E₅ | Eₐ |
| 1513 | E₁ₐ | AlkLEᵥᵢᵢ | E₄*E₅ | Eₐ |
| 1514 | E_{1b} | AlkLEᵥᵢᵢ | E₄*E₅ | Eₐ |
| 1515 | E₁ₐEᵢ | AlkLEᵥᵢᵢ | E₄*E₅ | Eₐ |
| 1516 | E_{1b}Eᵢ | AlkLEᵥᵢᵢ | E₄*E₅ | Eₐ |
| 1517 | E₁ₐEᵢᵢ | AlkLEᵥᵢᵢ | E₄*E₅ | Eₐ |
| 1518 | E_{1b}Eᵢᵢ | AlkLEᵥᵢᵢ | E₄*E₅ | Eₐ |
| 1519 | E₁ₐEᵢᵢE_{iib} | AlkLEᵥᵢᵢ | E₄*E₅ | Eₐ |
| 1520 | E_{1b}EᵢᵢE_{iib} | AlkLEᵥᵢᵢ | E₄*E₅ | Eₐ |
| 1521 | E₁ₐE₄ | AlkLEᵥᵢᵢ | E₄*E₅ | Eₐ |
| 1522 | E_{1b}E₄ | AlkLEᵥᵢᵢ | E₄*E₅ | Eₐ |
| 1523 | E₁ₐEᵢE₄ | AlkLEᵥᵢᵢ | E₄*E₅ | Eₐ |
| 1524 | E_{1b}EᵢE₄ | AlkLEᵥᵢᵢ | E₄*E₅ | Eₐ |
| 1525 | E₁ₐEᵢᵢE₄ | AlkLEᵥᵢᵢ | E₄*E₅ | Eₐ |
| 1526 | E_{1b}EᵢᵢE₄ | AlkLEᵥᵢᵢ | E₄*E₅ | Eₐ |
| 1527 | E₁ₐEᵢᵢE_{iib}E₄ | AlkLEᵥᵢᵢ | E₄*E₅ | Eₐ |
| 1528 | E_{1b}EᵢᵢE_{iib}E₄ | AlkLEᵥᵢᵢ | E₄*E₅ | Eₐ |
| 1529 | E₁ₐEᵢᵢᵢ | AlkLEᵥᵢᵢ | E₄*E₅ | Eₐ |
| 1530 | E_{1b}Eᵢᵢᵢ | AlkLEᵥᵢᵢ | E₄*E₅ | Eₐ |
| 1531 | E₁ₐEᵢᵢᵢE₄ | AlkLEᵥᵢᵢ | E₄*E₅ | Eₐ |
| 1532 | E_{1b}EᵢᵢᵢE₄ | AlkLEᵥᵢᵢ | E₄*E₅ | Eₐ |
| 1533 | E₁ₐEᵢᵥ | AlkLEᵥᵢᵢ | E₄*E₅ | Eₐ |
| 1534 | E_{1b}Eᵢᵥ | AlkLEᵥᵢᵢ | E₄*E₅ | Eₐ |
| 1535 | E₁ₐEᵢᵥE₄ | AlkLEᵥᵢᵢ | E₄*E₅ | Eₐ |
| 1536 | E_{1b}EᵢᵥE₄ | AlkLEᵥᵢᵢ | E₄*E₅ | Eₐ |
| 1537 | E₁ₐ | Eᵥᵢᵢ | | E_{b} |
| 1538 | E_{1b} | Eᵥᵢᵢ | | E_{b} |
| 1539 | E₁ₐEᵢ | Eᵥᵢᵢ | | E_{b} |
| 1540 | E_{1b}Eᵢ | Eᵥᵢᵢ | | E_{b} |
| 1541 | E₁ₐEᵢᵢ | Eᵥᵢᵢ | | E_{b} |
| 1542 | E_{1b}Eᵢᵢ | Eᵥᵢᵢ | | E_{b} |
| 1543 | E₁ₐEᵢᵢE_{iib} | Eᵥᵢᵢ | | E_{b} |
| 1544 | E_{1b}EᵢᵢE_{iib} | Eᵥᵢᵢ | | E_{b} |
| 1545 | E₁ₐE₄ | Eᵥᵢᵢ | | E_{b} |
| 1546 | E_{1b}E₄ | Eᵥᵢᵢ | | E_{b} |
| 1547 | E₁ₐEᵢE₄ | Eᵥᵢᵢ | | E_{b} |
| 1548 | E_{1b}EᵢE₄ | Eᵥᵢᵢ | | E_{b} |
| 1549 | E₁ₐEᵢᵢE₄ | Eᵥᵢᵢ | | E_{b} |
| 1550 | E_{1b}EᵢᵢE₄ | Eᵥᵢᵢ | | E_{b} |
| 1551 | E₁ₐEᵢᵢE_{iib}E₄ | Eᵥᵢᵢ | | E_{b} |
| 1552 | E_{1b}EᵢᵢE_{iib}E₄ | Eᵥᵢᵢ | | E_{b} |
| 1553 | E₁ₐEᵢᵢᵢ | Eᵥᵢᵢ | | E_{b} |
| 1554 | E_{1b}Eᵢᵢᵢ | Eᵥᵢᵢ | | E_{b} |
| 1555 | E₁ₐEᵢᵢᵢE₄ | Eᵥᵢᵢ | | E_{b} |
| 1556 | E_{1b}EᵢᵢᵢE₄ | Eᵥᵢᵢ | | E_{b} |
| 1557 | E₁ₐEᵢᵥ | Eᵥᵢᵢ | | E_{b} |
| 1558 | E_{1b}Eᵢᵥ | Eᵥᵢᵢ | | E_{b} |
| 1559 | E₁ₐEᵢᵥE₄ | Eᵥᵢᵢ | | E_{b} |
| 1560 | E_{1b}EᵢᵥE₄ | Eᵥᵢᵢ | | E_{b} |
| 1561 | E₁ₐ | Eᵥᵢᵢ | E₄* | E_{b} |
| 1562 | E_{1b} | Eᵥᵢᵢ | E₄* | E_{b} |
| 1563 | E₁ₐEᵢ | Eᵥᵢᵢ | E₄* | E_{b} |
| 1564 | E_{1b}Eᵢ | Eᵥᵢᵢ | E₄* | E_{b} |
| 1565 | E₁ₐEᵢᵢ | Eᵥᵢᵢ | E₄* | E_{b} |
| 1566 | E_{1b}Eᵢᵢ | Eᵥᵢᵢ | E₄* | E_{b} |
| 1567 | E₁ₐEᵢᵢE_{iib} | Eᵥᵢᵢ | E₄* | E_{b} |
| 1568 | E_{1b}EᵢᵢE_{iib} | Eᵥᵢᵢ | E₄* | E_{b} |
| 1569 | E₁ₐE₄ | Eᵥᵢᵢ | E₄* | E_{b} |
| 1570 | E_{1b}E₄ | Eᵥᵢᵢ | E₄* | E_{b} |
| 1571 | E₁ₐEᵢE₄ | Eᵥᵢᵢ | E₄* | E_{b} |
| 1572 | E_{1b}EᵢE₄ | Eᵥᵢᵢ | E₄* | E_{b} |
| 1573 | E₁ₐEᵢᵢE₄ | Eᵥᵢᵢ | E₄* | E_{b} |
| 1574 | E_{1b}EᵢᵢE₄ | Eᵥᵢᵢ | E₄* | E_{b} |
| 1575 | E₁ₐEᵢᵢE_{iib}E₄ | Eᵥᵢᵢ | E₄* | E_{b} |
| 1576 | E_{1b}EᵢᵢE_{iib}E₄ | Eᵥᵢᵢ | E₄* | E_{b} |
| 1577 | E₁ₐEᵢᵢᵢ | Eᵥᵢᵢ | E₄* | E_{b} |
| 1578 | E_{1b}Eᵢᵢᵢ | Eᵥᵢᵢ | E₄* | E_{b} |
| 1579 | E₁ₐEᵢᵢᵢE₄ | Eᵥᵢᵢ | E₄* | E_{b} |
| 1580 | E_{1b}EᵢᵢᵢE₄ | Eᵥᵢᵢ | E₄* | E_{b} |
| 1581 | E₁ₐEᵢᵥ | Eᵥᵢᵢ | E₄* | E_{b} |
| 1582 | E_{1b}Eᵢᵥ | Eᵥᵢᵢ | E₄* | E_{b} |
| 1583 | E₁ₐEᵢᵥE₄ | Eᵥᵢᵢ | E₄* | E_{b} |
| 1584 | E_{1b}EᵢᵥE₄ | Eᵥᵢᵢ | E₄* | E_{b} |
| 1585 | E₁ₐ | Eᵥᵢᵢ | E₅ | E_{b} |
| 1586 | E_{1b} | Eᵥᵢᵢ | E₅ | E_{b} |
| 1587 | E₁ₐEᵢ | Eᵥᵢᵢ | E₅ | E_{b} |
| 1588 | E_{1b}Eᵢ | Eᵥᵢᵢ | E₅ | E_{b} |
| 1589 | E₁ₐEᵢᵢ | Eᵥᵢᵢ | E₅ | E_{b} |
| 1590 | E_{1b}Eᵢᵢ | Eᵥᵢᵢ | E₅ | E_{b} |
| 1591 | E₁ₐEᵢᵢE_{iib} | Eᵥᵢᵢ | E₅ | E_{b} |
| 1592 | E_{1b}EᵢᵢE_{iib} | Eᵥᵢᵢ | E₅ | E_{b} |
| 1593 | E₁ₐE₄ | Eᵥᵢᵢ | E₅ | E_{b} |
| 1594 | E_{1b}E₄ | Eᵥᵢᵢ | E₅ | E_{b} |
| 1595 | E₁ₐEᵢE₄ | Eᵥᵢᵢ | E₅ | E_{b} |
| 1596 | E_{1b}EᵢE₄ | Eᵥᵢᵢ | E₅ | E_{b} |
| 1597 | E₁ₐEᵢᵢE₄ | Eᵥᵢᵢ | E₅ | E_{b} |
| 1598 | E_{1b}EᵢᵢE₄ | Eᵥᵢᵢ | E₅ | E_{b} |
| 1599 | E₁ₐEᵢᵢE_{iib}E₄ | Eᵥᵢᵢ | E₅ | E_{b} |
| 1600 | E_{1b}EᵢᵢE_{iib}E₄ | Eᵥᵢᵢ | E₅ | E_{b} |
| 1601 | E₁ₐEᵢᵢᵢ | Eᵥᵢᵢ | E₅ | E_{b} |
| 1602 | E_{1b}Eᵢᵢᵢ | Eᵥᵢᵢ | E₅ | E_{b} |
| 1603 | E₁ₐEᵢᵢᵢE₄ | Eᵥᵢᵢ | E₅ | E_{b} |
| 1604 | E_{1b}EᵢᵢᵢE₄ | Eᵥᵢᵢ | E₅ | E_{b} |
| 1605 | E₁ₐEᵢᵥ | Eᵥᵢᵢ | E₅ | E_{b} |
| 1606 | E_{1b}Eᵢᵥ | Eᵥᵢᵢ | E₅ | E_{b} |
| 1607 | E₁ₐEᵢᵥE₄ | Eᵥᵢᵢ | E₅ | E_{b} |
| 1608 | E_{1b}EᵢᵥE₄ | Eᵥᵢᵢ | E₅ | E_{b} |
| 1609 | E₁ₐ | Eᵥᵢᵢ | E₄*E₅ | E_{b} |
| 1610 | E_{1b} | Eᵥᵢᵢ | E₄*E₅ | E_{b} |
| 1611 | E₁ₐEᵢ | Eᵥᵢᵢ | E₄*E₅ | E_{b} |
| 1612 | E_{1b}Eᵢ | Eᵥᵢᵢ | E₄*E₅ | E_{b} |
| 1613 | E₁ₐEᵢᵢ | Eᵥᵢᵢ | E₄*E₅ | E_{b} |
| 1614 | E_{1b}Eᵢᵢ | Eᵥᵢᵢ | E₄*E₅ | E_{b} |
| 1615 | E₁ₐEᵢᵢE_{iib} | Eᵥᵢᵢ | E₄*E₅ | E_{b} |
| 1616 | E_{1b}EᵢᵢE_{iib} | Eᵥᵢᵢ | E₄*E₅ | E_{b} |
| 1617 | E₁ₐE₄ | Eᵥᵢᵢ | E₄*E₅ | E_{b} |
| 1618 | E_{1b}E₄ | Eᵥᵢᵢ | E₄*E₅ | E_{b} |
| 1619 | E₁ₐEᵢE₄ | Eᵥᵢᵢ | E₄*E₅ | E_{b} |
| 1620 | E_{1b}EᵢE₄ | Eᵥᵢᵢ | E₄*E₅ | E_{b} |
| 1621 | E₁ₐEᵢᵢE₄ | Eᵥᵢᵢ | E₄*E₅ | E_{b} |
| 1622 | E_{1b}EᵢᵢE₄ | Eᵥᵢᵢ | E₄*E₅ | E_{b} |
| 1623 | E₁ₐEᵢᵢE_{iib}E₄ | Eᵥᵢᵢ | E₄*E₅ | E_{b} |
| 1624 | E_{1b}EᵢᵢE_{iib}E₄ | Eᵥᵢᵢ | E₄*E₅ | E_{b} |
| 1625 | E₁ₐEᵢᵢᵢ | Eᵥᵢᵢ | E₄*E₅ | E_{b} |
| 1626 | E_{1b}Eᵢᵢᵢ | Eᵥᵢᵢ | E₄*E₅ | E_{b} |
| 1627 | E₁ₐEᵢᵢᵢE₄ | Eᵥᵢᵢ | E₄*E₅ | E_{b} |
| 1628 | E_{1b}EᵢᵢᵢE₄ | Eᵥᵢᵢ | E₄*E₅ | E_{b} |
| 1629 | E₁ₐEᵢᵥ | Eᵥᵢᵢ | E₄*E₅ | E_{b} |
| 1630 | E_{1b}Eᵢᵥ | Eᵥᵢᵢ | E₄*E₅ | E_{b} |
| 1631 | E₁ₐEᵢᵥE₄ | Eᵥᵢᵢ | E₄*E₅ | E_{b} |
| 1632 | E_{1b}EᵢᵥE₄ | Eᵥᵢᵢ | E₄*E₅ | E_{b} |
| 1633 | E₁ₐ | AlkLEᵥᵢᵢ | | E_{b} |
| 1634 | E_{1b} | AlkLEᵥᵢᵢ | | E_{b} |
| 1635 | E₁ₐEᵢ | AlkLEᵥᵢᵢ | | E_{b} |
| 1636 | E_{1b}Eᵢ | AlkLEᵥᵢᵢ | | E_{b} |
| 1637 | E₁ₐEᵢᵢ | AlkLEᵥᵢᵢ | | E_{b} |
| 1638 | E_{1b}Eᵢᵢ | AlkLEᵥᵢᵢ | | E_{b} |
| 1639 | E₁ₐEᵢᵢE_{iib} | AlkLEᵥᵢᵢ | | E_{b} |
| 1640 | E_{1b}EᵢᵢE_{iib} | AlkLEᵥᵢᵢ | | E_{b} |
| 1641 | E₁ₐE₄ | AlkLEᵥᵢᵢ | | E_{b} |
| 1642 | E_{1b}E₄ | AlkLEᵥᵢᵢ | | E_{b} |
| 1643 | E₁ₐEᵢE₄ | AlkLEᵥᵢᵢ | | E_{b} |
| 1644 | E_{1b}EᵢE₄ | AlkLEᵥᵢᵢ | | E_{b} |
| 1645 | E₁ₐEᵢᵢE₄ | AlkLEᵥᵢᵢ | | E_{b} |
| 1646 | E_{1b}EᵢᵢE₄ | AlkLEᵥᵢᵢ | | E_{b} |
| 1647 | E₁ₐEᵢᵢE_{iib}E₄ | AlkLEᵥᵢᵢ | | E_{b} |
| 1648 | E_{1b}EᵢᵢE_{iib}E₄ | AlkLEᵥᵢᵢ | | E_{b} |
| 1649 | E₁ₐEᵢᵢᵢ | AlkLEᵥᵢᵢ | | E_{b} |
| 1650 | E_{1b}Eᵢᵢᵢ | AlkLEᵥᵢᵢ | | E_{b} |
| 1651 | E₁ₐEᵢᵢᵢE₄ | AlkLEᵥᵢᵢ | | E_{b} |
| 1652 | E_{1b}EᵢᵢᵢE₄ | AlkLEᵥᵢᵢ | | E_{b} |
| 1653 | E₁ₐEᵢᵥ | AlkLEᵥᵢᵢ | | E_{b} |
| 1654 | E_{1b}Eᵢᵥ | AlkLEᵥᵢᵢ | | E_{b} |
| 1655 | E₁ₐEᵢᵥE₄ | AlkLEᵥᵢᵢ | | E_{b} |
| 1656 | E_{1b}EᵢᵥE₄ | AlkLEᵥᵢᵢ | | E_{b} |
| 1657 | E₁ₐ | AlkLEᵥᵢᵢ | E₄* | E_{b} |
| 1658 | E_{1b} | AlkLEᵥᵢᵢ | E₄* | E_{b} |
| 1659 | E₁ₐEᵢ | AlkLEᵥᵢᵢ | E₄* | E_{b} |
| 1660 | E_{1b}Eᵢ | AlkLEᵥᵢᵢ | E₄* | E_{b} |
| 1661 | E₁ₐEᵢᵢ | AlkLEᵥᵢᵢ | E₄* | E_{b} |
| 1662 | E_{1b}Eᵢᵢ | AlkLEᵥᵢᵢ | E₄* | E_{b} |
| 1663 | E₁ₐEᵢᵢE_{iib} | AlkLEᵥᵢᵢ | E₄* | E_{b} |
| 1664 | E_{1b}EᵢᵢE_{iib} | AlkLEᵥᵢᵢ | E₄* | E_{b} |
| 1665 | E₁ₐE₄ | AlkLEᵥᵢᵢ | E₄* | E_{b} |
| 1666 | E_{1b}E₄ | AlkLEᵥᵢᵢ | E₄* | E_{b} |
| 1667 | E₁ₐEᵢE₄ | AlkLEᵥᵢᵢ | E₄* | E_{b} |
| 1668 | E_{1b}EᵢE₄ | AlkLEᵥᵢᵢ | E₄* | E_{b} |
| 1669 | E₁ₐEᵢᵢE₄ | AlkLEᵥᵢᵢ | E₄* | E_{b} |
| 1670 | E_{1b}EᵢᵢE₄ | AlkLEᵥᵢᵢ | E₄* | E_{b} |
| 1671 | E₁ₐEᵢᵢE_{iib}E₄ | AlkLEᵥᵢᵢ | E₄* | E_{b} |
| 1672 | E_{1b}EᵢᵢE_{iib}E₄ | AlkLEᵥᵢᵢ | E₄* | E_{b} |
| 1673 | E₁ₐEᵢᵢᵢ | AlkLEᵥᵢᵢ | E₄* | E_{b} |
| 1674 | E_{1b}Eᵢᵢᵢ | AlkLEᵥᵢᵢ | E₄* | E_{b} |
| 1675 | E₁ₐEᵢᵢᵢE₄ | AlkLEᵥᵢᵢ | E₄* | E_{b} |
| 1676 | E_{1b}EᵢᵢᵢE₄ | AlkLEᵥᵢᵢ | E₄* | E_{b} |
| 1677 | E₁ₐEᵢᵥ | AlkLEᵥᵢᵢ | E₄* | E_{b} |
| 1678 | E_{1b}Eᵢᵥ | AlkLEᵥᵢᵢ | E₄* | E_{b} |
| 1679 | E₁ₐEᵢᵥE₄ | AlkLEᵥᵢᵢ | E₄* | E_{b} |
| 1680 | E_{1b}EᵢᵥE₄ | AlkLEᵥᵢᵢ | E₄* | E_{b} |
| 1681 | E₁ₐ | AlkLEᵥᵢᵢ | E₅ | E_{b} |
| 1682 | E_{1b} | AlkLEᵥᵢᵢ | E₅ | E_{b} |
| 1683 | E₁ₐEᵢ | AlkLEᵥᵢᵢ | E₅ | E_{b} |
| 1684 | E_{1b}Eᵢ | AlkLEᵥᵢᵢ | E₅ | E_{b} |
| 1685 | E₁ₐEᵢᵢ | AlkLEᵥᵢᵢ | E₅ | E_{b} |
| 1686 | E_{1b}Eᵢᵢ | AlkLEᵥᵢᵢ | E₅ | E_{b} |
| 1687 | E₁ₐEᵢᵢE_{iib} | AlkLEᵥᵢᵢ | E₅ | E_{b} |
| 1688 | E_{1b}EᵢᵢE_{iib} | AlkLEᵥᵢᵢ | E₅ | E_{b} |
| 1689 | E₁ₐE₄ | AlkLEᵥᵢᵢ | E₅ | E_{b} |
| 1690 | E_{1b}E₄ | AlkLEᵥᵢᵢ | E₅ | E_{b} |
| 1691 | E₁ₐEᵢE₄ | AlkLEᵥᵢᵢ | E₅ | E_{b} |
| 1692 | E_{1b}EᵢE₄ | AlkLEᵥᵢᵢ | E₅ | E_{b} |
| 1693 | E₁ₐEᵢᵢE₄ | AlkLEᵥᵢᵢ | E₅ | E_{b} |
| 1694 | E_{1b}EᵢᵢE₄ | AlkLEᵥᵢᵢ | E₅ | E_{b} |
| 1695 | E₁ₐEᵢᵢE_{iib}E₄ | AlkLEᵥᵢᵢ | E₅ | E_{b} |
| 1696 | E_{1b}EᵢᵢE_{iib}E₄ | AlkLEᵥᵢᵢ | E₅ | E_{b} |
| 1697 | E₁ₐEᵢᵢᵢ | AlkLEᵥᵢᵢ | E₅ | E_{b} |
| 1698 | E_{1b}Eᵢᵢᵢ | AlkLEᵥᵢᵢ | E₅ | E_{b} |
| 1699 | E₁ₐEᵢᵢᵢE₄ | AlkLEᵥᵢᵢ | E₅ | E_{b} |
| 1700 | E_{1b}EᵢᵢᵢE₄ | AlkLEᵥᵢᵢ | E₅ | E_{b} |
| 1701 | E₁ₐEᵢᵥ | AlkLEᵥᵢᵢ | E₅ | E_{b} |
| 1702 | E_{1b}Eᵢᵥ | AlkLEᵥᵢᵢ | E₅ | E_{b} |
| 1703 | E₁ₐEᵢᵥE₄ | AlkLEᵥᵢᵢ | E₅ | E_{b} |
| 1704 | E_{1b}EᵢᵥE₄ | AlkLEᵥᵢᵢ | E₅ | E_{b} |
| 1705 | E₁ₐ | AlkLEᵥᵢᵢ | E₄*E₅ | E_{b} |
| 1706 | E_{1b} | AlkLEᵥᵢᵢ | E₄*E₅ | E_{b} |
| 1707 | E₁ₐEᵢ | AlkLEᵥᵢᵢ | E₄*E₅ | E_{b} |
| 1708 | E_{1b}Eᵢ | AlkLEᵥᵢᵢ | E₄*E₅ | E_{b} |
| 1709 | E₁ₐEᵢᵢ | AlkLEᵥᵢᵢ | E₄*E₅ | E_{b} |
| 1710 | E_{1b}Eᵢᵢ | AlkLEᵥᵢᵢ | E₄*E₅ | E_{b} |
| 1711 | E₁ₐEᵢᵢE_{iib} | AlkLEᵥᵢᵢ | E₄*E₅ | E_{b} |
| 1712 | E_{1b}EᵢᵢE_{iib} | AlkLEᵥᵢᵢ | E₄*E₅ | E_{b} |
| 1713 | E₁ₐE₄ | AlkLEᵥᵢᵢ | E₄*E₅ | E_{b} |
| 1714 | E_{1b}E₄ | AlkLEᵥᵢᵢ | E₄*E₅ | E_{b} |
| 1715 | E₁ₐEᵢE₄ | AlkLEᵥᵢᵢ | E₄*E₅ | E_{b} |
| 1716 | E_{1b}EᵢE₄ | AlkLEᵥᵢᵢ | E₄*E₅ | E_{b} |
| 1717 | E₁ₐEᵢᵢE₄ | AlkLEᵥᵢᵢ | E₄*E₅ | E_{b} |
| 1718 | E_{1b}EᵢᵢE₄ | AlkLEᵥᵢᵢ | E₄*E₅ | E_{b} |
| 1719 | E₁ₐEᵢᵢE_{iib}E₄ | AlkLEᵥᵢᵢ | E₄*E₅ | E_{b} |
| 1720 | E_{1b}EᵢᵢE_{iib}E₄ | AlkLEᵥᵢᵢ | E₄*E₅ | E_{b} |
| 1721 | E₁ₐEᵢᵢᵢ | AlkLEᵥᵢᵢ | E₄*E₅ | E_{b} |
| 1722 | E_{1b}Eᵢᵢᵢ | AlkLEᵥᵢᵢ | E₄*E₅ | E_{b} |
| 1723 | E₁ₐEᵢᵢᵢE₄ | AlkLEᵥᵢᵢ | E₄*E₅ | E_{b} |
| 1724 | E_{1b}EᵢᵢᵢE₄ | AlkLEᵥᵢᵢ | E₄*E₅ | E_{b} |
| 1725 | E₁ₐEᵢᵥ | AlkLEᵥᵢᵢ | E₄*E₅ | E_{b} |
| 1726 | E_{1b}Eᵢᵥ | AlkLEᵥᵢᵢ | E₄*E₅ | E_{b} |
| 1727 | E₁ₐEᵢᵥE₄ | AlkLEᵥᵢᵢ | E₄*E₅ | E_{b} |
| 1728 | E_{1b}EᵢᵥE₄ | AlkLEᵥᵢᵢ | E₄*E₅ | E_{b} |
| 1729 | E₁ₐ | Eᵥᵢᵢ | | E_{d} |
| 1730 | E_{1b} | Eᵥᵢᵢ | | E_{d} |
| 1731 | E₁ₐEᵢ | Eᵥᵢᵢ | | E_{d} |
| 1732 | E_{1b}Eᵢ | Eᵥᵢᵢ | | E_{d} |
| 1733 | E₁ₐEᵢᵢ | Eᵥᵢᵢ | | E_{d} |
| 1734 | E_{1b}Eᵢᵢ | Eᵥᵢᵢ | | E_{d} |
| 1735 | E₁ₐEᵢᵢE_{iib} | Eᵥᵢᵢ | | E_{d} |
| 1736 | E_{1b}EᵢᵢE_{iib} | Eᵥᵢᵢ | | E_{d} |
| 1737 | E₁ₐE₄ | Eᵥᵢᵢ | | E_{d} |
| 1738 | E_{1b}E₄ | Eᵥᵢᵢ | | E_{d} |
| 1739 | E₁ₐEᵢE₄ | Eᵥᵢᵢ | | E_{d} |
| 1740 | E_{1b}EᵢE₄ | Eᵥᵢᵢ | | E_{d} |
| 1741 | E₁ₐEᵢᵢE₄ | Eᵥᵢᵢ | | E_{d} |
| 1742 | E_{1b}EᵢᵢE₄ | Eᵥᵢᵢ | | E_{d} |
| 1743 | E₁ₐEᵢᵢE_{iib}E₄ | Eᵥᵢᵢ | | E_{d} |
| 1744 | E_{1b}EᵢᵢE_{iib}E₄ | Eᵥᵢᵢ | | E_{d} |
| 1745 | E₁ₐEᵢᵢᵢ | Eᵥᵢᵢ | | E_{d} |
| 1746 | E_{1b}Eᵢᵢᵢ | Eᵥᵢᵢ | | E_{d} |
| 1747 | E₁ₐEᵢᵢᵢE₄ | Eᵥᵢᵢ | | E_{d} |
| 1748 | E_{1b}EᵢᵢᵢE₄ | Eᵥᵢᵢ | | E_{d} |
| 1749 | E₁ₐEᵢᵥ | Eᵥᵢᵢ | | E_{d} |
| 1750 | E_{1b}Eᵢᵥ | Eᵥᵢᵢ | | E_{d} |
| 1751 | E₁ₐEᵢᵥE₄ | Eᵥᵢᵢ | | E_{d} |
| 1752 | E_{1b}EᵢᵥE₄ | Eᵥᵢᵢ | | E_{d} |
| 1753 | E₁ₐ | Eᵥᵢᵢ | E₄* | E_{d} |
| 1754 | E_{1b} | Eᵥᵢᵢ | E₄* | E_{d} |
| 1755 | E₁ₐEᵢ | Eᵥᵢᵢ | E₄* | E_{d} |
| 1756 | E_{1b}Eᵢ | Eᵥᵢᵢ | E₄* | E_{d} |
| 1757 | E₁ₐEᵢᵢ | Eᵥᵢᵢ | E₄* | E_{d} |
| 1758 | E_{1b}Eᵢᵢ | Eᵥᵢᵢ | E₄* | E_{d} |
| 1759 | E₁ₐEᵢᵢE_{iib} | Eᵥᵢᵢ | E₄* | E_{d} |
| 1760 | E_{1b}EᵢᵢE_{iib} | Eᵥᵢᵢ | E₄* | E_{d} |
| 1761 | E₁ₐE₄ | Eᵥᵢᵢ | E₄* | E_{d} |
| 1762 | E_{1b}E₄ | Eᵥᵢᵢ | E₄* | E_{d} |
| 1763 | E₁ₐEᵢE₄ | Eᵥᵢᵢ | E₄* | E_{d} |
| 1764 | E_{1b}EᵢE₄ | Eᵥᵢᵢ | E₄* | E_{d} |
| 1765 | E₁ₐEᵢᵢE₄ | Eᵥᵢᵢ | E₄* | E_{d} |
| 1766 | E_{1b}EᵢᵢE₄ | Eᵥᵢᵢ | E₄* | E_{d} |
| 1767 | E₁ₐEᵢᵢE_{iib}E₄ | Eᵥᵢᵢ | E₄* | E_{d} |
| 1768 | E_{1b}EᵢᵢE_{iib}E₄ | Eᵥᵢᵢ | E₄* | E_{d} |
| 1769 | E₁ₐEᵢᵢᵢ | Eᵥᵢᵢ | E₄* | E_{d} |
| 1770 | E_{1b}Eᵢᵢᵢ | Eᵥᵢᵢ | E₄* | E_{d} |
| 1771 | E₁ₐEᵢᵢᵢE₄ | Eᵥᵢᵢ | E₄* | E_{d} |
| 1772 | E_{1b}EᵢᵢᵢE₄ | Eᵥᵢᵢ | E₄* | E_{d} |
| 1773 | E₁ₐEᵢᵥ | Eᵥᵢᵢ | E₄* | E_{d} |
| 1774 | E_{1b}Eᵢᵥ | Eᵥᵢᵢ | E₄* | E_{d} |
| 1775 | E₁ₐEᵢᵥE₄ | Eᵥᵢᵢ | E₄* | E_{d} |
| 1776 | E_{1b}EᵢᵥE₄ | Eᵥᵢᵢ | E₄* | E_{d} |
| 1777 | E₁ₐ | Eᵥᵢᵢ | E₅ | E_{d} |
| 1778 | E_{1b} | Eᵥᵢᵢ | E₅ | E_{d} |
| 1779 | E₁ₐEᵢ | Eᵥᵢᵢ | E₅ | E_{d} |
| 1780 | E_{1b}Eᵢ | Eᵥᵢᵢ | E₅ | E_{d} |
| 1781 | E₁ₐEᵢᵢ | Eᵥᵢᵢ | E₅ | E_{d} |
| 1782 | E_{1b}Eᵢᵢ | Eᵥᵢᵢ | E₅ | E_{d} |
| 1783 | E₁ₐEᵢᵢE_{iib} | Eᵥᵢᵢ | E₅ | E_{d} |
| 1784 | E_{1b}EᵢᵢE_{iib} | Eᵥᵢᵢ | E₅ | E_{d} |
| 1785 | E₁ₐE₄ | Eᵥᵢᵢ | E₅ | E_{d} |
| 1786 | E_{1b}E₄ | Eᵥᵢᵢ | E₅ | E_{d} |
| 1787 | E₁ₐEᵢE₄ | Eᵥᵢᵢ | E₅ | E_{d} |
| 1788 | E_{1b}EᵢE₄ | Eᵥᵢᵢ | E₅ | E_{d} |
| 1789 | E₁ₐEᵢᵢE₄ | Eᵥᵢᵢ | E₅ | E_{d} |
| 1790 | E_{1b}EᵢᵢE₄ | Eᵥᵢᵢ | E₅ | E_{d} |
| 1791 | E₁ₐEᵢᵢE_{iib}E₄ | Eᵥᵢᵢ | E₅ | E_{d} |
| 1792 | E_{1b}EᵢᵢE_{iib}E₄ | Eᵥᵢᵢ | E₅ | E_{d} |
| 1793 | E₁ₐEᵢᵢᵢ | Eᵥᵢᵢ | E₅ | E_{d} |
| 1794 | E_{1b}Eᵢᵢᵢ | Eᵥᵢᵢ | E₅ | E_{d} |
| 1795 | E₁ₐEᵢᵢᵢE₄ | Eᵥᵢᵢ | E₅ | E_{d} |
| 1796 | E_{1b}EᵢᵢᵢE₄ | Eᵥᵢᵢ | E₅ | E_{d} |
| 1797 | E₁ₐEᵢᵥ | Eᵥᵢᵢ | E₅ | E_{d} |
| 1798 | E_{1b}Eᵢᵥ | Eᵥᵢᵢ | E₅ | E_{d} |
| 1799 | E₁ₐEᵢᵥE₄ | Eᵥᵢᵢ | E₅ | E_{d} |
| 1800 | E_{1b}EᵢᵥE₄ | Eᵥᵢᵢ | E₅ | E_{d} |
| 1801 | E₁ₐ | Eᵥᵢᵢ | E₄*E₅ | E_{d} |
| 1802 | E_{1b} | Eᵥᵢᵢ | E₄*E₅ | E_{d} |
| 1803 | E₁ₐEᵢ | Eᵥᵢᵢ | E₄*E₅ | E_{d} |
| 1804 | E_{1b}Eᵢ | Eᵥᵢᵢ | E₄*E₅ | E_{d} |
| 1805 | E₁ₐEᵢᵢ | Eᵥᵢᵢ | E₄*E₅ | E_{d} |
| 1806 | E_{1b}Eᵢᵢ | Eᵥᵢᵢ | E₄*E₅ | E_{d} |
| 1807 | E₁ₐEᵢᵢE_{iib} | Eᵥᵢᵢ | E₄*E₅ | E_{d} |
| 1808 | E_{1b}EᵢᵢE_{iib} | Eᵥᵢᵢ | E₄*E₅ | E_{d} |
| 1809 | E₁ₐE₄ | Eᵥᵢᵢ | E₄*E₅ | E_{d} |
| 1810 | E_{1b}E₄ | Eᵥᵢᵢ | E₄*E₅ | E_{d} |
| 1811 | E₁ₐEᵢE₄ | Eᵥᵢᵢ | E₄*E₅ | E_{d} |
| 1812 | E_{1b}EᵢE₄ | Eᵥᵢᵢ | E₄*E₅ | E_{d} |
| 1813 | E₁ₐEᵢᵢE₄ | Eᵥᵢᵢ | E₄*E₅ | E_{d} |
| 1814 | E_{1b}EᵢᵢE₄ | Eᵥᵢᵢ | E₄*E₅ | E_{d} |
| 1815 | E₁ₐEᵢᵢE_{iib}E₄ | Eᵥᵢᵢ | E₄*E₅ | E_{d} |
| 1816 | E_{1b}EᵢᵢE_{iib}E₄ | Eᵥᵢᵢ | E₄*E₅ | E_{d} |
| 1817 | E₁ₐEᵢᵢᵢ | Eᵥᵢᵢ | E₄*E₅ | E_{d} |
| 1818 | E_{1b}Eᵢᵢᵢ | Eᵥᵢᵢ | E₄*E₅ | E_{d} |
| 1819 | E₁ₐEᵢᵢᵢE₄ | Eᵥᵢᵢ | E₄*E₅ | E_{d} |
| 1820 | E_{1b}EᵢᵢᵢE₄ | Eᵥᵢᵢ | E₄*E₅ | E_{d} |
| 1821 | E₁ₐEᵢᵥ | Eᵥᵢᵢ | E₄*E₅ | E_{d} |
| 1822 | E_{1b}Eᵢᵥ | Eᵥᵢᵢ | E₄*E₅ | E_{d} |
| 1823 | E₁ₐEᵢᵥE₄ | Eᵥᵢᵢ | E₄*E₅ | E_{d} |
| 1824 | E_{1b}EᵢᵥE₄ | Eᵥᵢᵢ | E₄*E₅ | E_{d} |
| 1825 | E₁ₐ | AlkLEᵥᵢᵢ | | E_{d} |
| 1826 | E_{1b} | AlkLEᵥᵢᵢ | | E_{d} |
| 1827 | E₁ₐEᵢ | AlkLEᵥᵢᵢ | | E_{d} |
| 1828 | E_{1b}Eᵢ | AlkLEᵥᵢᵢ | | E_{d} |
| 1829 | E₁ₐEᵢᵢ | AlkLEᵥᵢᵢ | | E_{d} |
| 1830 | E_{1b}Eᵢᵢ | AlkLEᵥᵢᵢ | | E_{d} |
| 1831 | E₁ₐEᵢᵢE_{iib} | AlkLEᵥᵢᵢ | | E_{d} |
| 1832 | E_{1b}EᵢᵢE_{iib} | AlkLEᵥᵢᵢ | | E_{d} |
| 1833 | E₁ₐE₄ | AlkLEᵥᵢᵢ | | E_{d} |
| 1834 | E_{1b}E₄ | AlkLEᵥᵢᵢ | | E_{d} |
| 1835 | E₁ₐEᵢE₄ | AlkLEᵥᵢᵢ | | E_{d} |
| 1836 | E_{1b}EᵢE₄ | AlkLEᵥᵢᵢ | | E_{d} |
| 1837 | E₁ₐEᵢᵢE₄ | AlkLEᵥᵢᵢ | | E_{d} |
| 1838 | E_{1b}EᵢᵢE₄ | AlkLEᵥᵢᵢ | | E_{d} |
| 1839 | E₁ₐEᵢᵢE_{iib}E₄ | AlkLEᵥᵢᵢ | | E_{d} |
| 1840 | E_{1b}EᵢᵢE_{iib}E₄ | AlkLEᵥᵢᵢ | | E_{d} |
| 1841 | E₁ₐEᵢᵢᵢ | AlkLEᵥᵢᵢ | | E_{d} |
| 1842 | E_{1b}Eᵢᵢᵢ | AlkLEᵥᵢᵢ | | E_{d} |
| 1843 | E₁ₐEᵢᵢᵢE₄ | AlkLEᵥᵢᵢ | | E_{d} |
| 1844 | E_{1b}EᵢᵢᵢE₄ | AlkLEᵥᵢᵢ | | E_{d} |
| 1845 | E₁ₐEᵢᵥ | AlkLEᵥᵢᵢ | | E_{d} |
| 1846 | E_{1b}Eᵢᵥ | AlkLEᵥᵢᵢ | | E_{d} |
| 1847 | E₁ₐEᵢᵥE₄ | AlkLEᵥᵢᵢ | | E_{d} |
| 1848 | E_{1b}EᵢᵥE₄ | AlkLEᵥᵢᵢ | | E_{d} |
| 1849 | E₁ₐ | AlkLEᵥᵢᵢ | E₄* | E_{d} |
| 1850 | E_{1b} | AlkLEᵥᵢᵢ | E₄* | E_{d} |
| 1851 | E₁ₐEᵢ | AlkLEᵥᵢᵢ | E₄* | E_{d} |
| 1852 | E_{1b}Eᵢ | AlkLEᵥᵢᵢ | E₄* | E_{d} |
| 1853 | E₁ₐEᵢᵢ | AlkLEᵥᵢᵢ | E₄* | E_{d} |
| 1854 | E_{1b}Eᵢᵢ | AlkLEᵥᵢᵢ | E₄* | E_{d} |
| 1855 | E₁ₐEᵢᵢE_{iib} | AlkLEᵥᵢᵢ | E₄* | E_{d} |
| 1856 | E_{1b}EᵢᵢE_{iib} | AlkLEᵥᵢᵢ | E₄* | E_{d} |
| 1857 | E₁ₐE₄ | AlkLEᵥᵢᵢ | E₄* | E_{d} |
| 1858 | E_{1b}E₄ | AlkLEᵥᵢᵢ | E₄* | E_{d} |
| 1859 | E₁ₐEᵢE₄ | AlkLEᵥᵢᵢ | E₄* | E_{d} |
| 1860 | E_{1b}EᵢE₄ | AlkLEᵥᵢᵢ | E₄* | E_{d} |
| 1861 | E₁ₐEᵢᵢE₄ | AlkLEᵥᵢᵢ | E₄* | E_{d} |
| 1862 | E_{1b}EᵢᵢE₄ | AlkLEᵥᵢᵢ | E₄* | E_{d} |
| 1863 | E₁ₐEᵢᵢE_{iib}E₄ | AlkLEᵥᵢᵢ | E₄* | E_{d} |
| 1864 | E_{1b}EᵢᵢE_{iib}E₄ | AlkLEᵥᵢᵢ | E₄* | E_{d} |
| 1865 | E₁ₐEᵢᵢᵢ | AlkLEᵥᵢᵢ | E₄* | E_{d} |
| 1866 | E_{1b}Eᵢᵢᵢ | AlkLEᵥᵢᵢ | E₄* | E_{d} |
| 1867 | E₁ₐEᵢᵢᵢE₄ | AlkLEᵥᵢᵢ | E₄* | E_{d} |
| 1868 | E_{1b}EᵢᵢᵢE₄ | AlkLEᵥᵢᵢ | E₄* | E_{d} |
| 1869 | E₁ₐEᵢᵥ | AlkLEᵥᵢᵢ | E₄* | E_{d} |
| 1870 | E_{1b}Eᵢᵥ | AlkLEᵥᵢᵢ | E₄* | E_{d} |
| 1871 | E₁ₐEᵢᵥE₄ | AlkLEᵥᵢᵢ | E₄* | E_{d} |
| 1872 | E_{1b}EᵢᵥE₄ | AlkLEᵥᵢᵢ | E₄* | E_{d} |
| 1873 | E₁ₐ | AlkLEᵥᵢᵢ | E₅ | E_{d} |
| 1874 | E_{1b} | AlkLEᵥᵢᵢ | E₅ | E_{d} |
| 1875 | E₁ₐEᵢ | AlkLEᵥᵢᵢ | E₅ | E_{d} |
| 1876 | E_{1b}Eᵢ | AlkLEᵥᵢᵢ | E₅ | E_{d} |
| 1877 | E₁ₐEᵢᵢ | AlkLEᵥᵢᵢ | E₅ | E_{d} |
| 1878 | E_{1b}Eᵢᵢ | AlkLEᵥᵢᵢ | E₅ | E_{d} |
| 1879 | E₁ₐEᵢᵢE_{iib} | AlkLEᵥᵢᵢ | E₅ | E_{d} |
| 1880 | E_{1b}EᵢᵢE_{iib} | AlkLEᵥᵢᵢ | E₅ | E_{d} |
| 1881 | E₁ₐE₄ | AlkLEᵥᵢᵢ | E₅ | E_{d} |
| 1882 | E_{1b}E₄ | AlkLEᵥᵢᵢ | E₅ | E_{d} |
| 1883 | E₁ₐEᵢE₄ | AlkLEᵥᵢᵢ | E₅ | E_{d} |
| 1884 | E_{1b}EᵢE₄ | AlkLEᵥᵢᵢ | E₅ | E_{d} |
| 1885 | E₁ₐEᵢᵢE₄ | AlkLEᵥᵢᵢ | E₅ | E_{d} |
| 1886 | E_{1b}EᵢᵢE₄ | AlkLEᵥᵢᵢ | E₅ | E_{d} |
| 1887 | E₁ₐEᵢᵢE_{iib}E₄ | AlkLEᵥᵢᵢ | E₅ | E_{d} |
| 1888 | E_{1b}EᵢᵢE_{iib}E₄ | AlkLEᵥᵢᵢ | E₅ | E_{d} |
| 1889 | E₁ₐEᵢᵢᵢ | AlkLEᵥᵢᵢ | E₅ | E_{d} |
| 1890 | E_{1b}Eᵢᵢᵢ | AlkLEᵥᵢᵢ | E₅ | E_{d} |
| 1891 | E₁ₐEᵢᵢᵢE₄ | AlkLEᵥᵢᵢ | E₅ | E_{d} |
| 1892 | E_{1b}EᵢᵢᵢE₄ | AlkLEᵥᵢᵢ | E₅ | E_{d} |
| 1893 | E₁ₐEᵢᵥ | AlkLEᵥᵢᵢ | E₅ | E_{d} |
| 1894 | E_{1b}Eᵢᵥ | AlkLEᵥᵢᵢ | E₅ | E_{d} |
| 1895 | E₁ₐEᵢᵥE₄ | AlkLEᵥᵢᵢ | E₅ | E_{d} |
| 1896 | E_{1b}EᵢᵥE₄ | AlkLEᵥᵢᵢ | E₅ | E_{d} |
| 1897 | E₁ₐ | AlkLEᵥᵢᵢ | E₄*E₅ | E_{d} |
| 1898 | E_{1b} | AlkLEᵥᵢᵢ | E₄*E₅ | E_{d} |
| 1899 | E₁ₐEᵢ | AlkLEᵥᵢᵢ | E₄*E₅ | E_{d} |
| 1900 | E_{1b}Eᵢ | AlkLEᵥᵢᵢ | E₄*E₅ | E_{d} |
| 1901 | E₁ₐEᵢᵢ | AlkLEᵥᵢᵢ | E₄*E₅ | E_{d} |
| 1902 | E_{1b}Eᵢᵢ | AlkLEᵥᵢᵢ | E₄*E₅ | E_{d} |
| 1903 | E₁ₐEᵢᵢE_{iib} | AlkLEᵥᵢᵢ | E₄*E₅ | E_{d} |
| 1904 | E_{1b}EᵢᵢE_{iib} | AlkLEᵥᵢᵢ | E₄*E₅ | E_{d} |
| 1905 | E₁ₐE₄ | AlkLEᵥᵢᵢ | E₄*E₅ | E_{d} |
| 1906 | E_{1b}E₄ | AlkLEᵥᵢᵢ | E₄*E₅ | E_{d} |
| 1907 | E₁ₐEᵢE₄ | AlkLEᵥᵢᵢ | E₄*E₅ | E_{d} |
| 1908 | E_{1b}EᵢE₄ | AlkLEᵥᵢᵢ | E₄*E₅ | E_{d} |
| 1909 | E₁ₐEᵢᵢE₄ | AlkLEᵥᵢᵢ | E₄*E₅ | E_{d} |
| 1910 | E_{1b}EᵢᵢE₄ | AlkLEᵥᵢᵢ | E₄*E₅ | E_{d} |
| 1911 | E₁ₐEᵢᵢE_{iib}E₄ | AlkLEᵥᵢᵢ | E₄*E₅ | E_{d} |
| 1912 | E_{1b}EᵢᵢE_{iib}E₄ | AlkLEᵥᵢᵢ | E₄*E₅ | E_{d} |
| 1913 | E₁ₐEᵢᵢᵢ | AlkLEᵥᵢᵢ | E₄*E₅ | E_{d} |
| 1914 | E_{1b}Eᵢᵢᵢ | AlkLEᵥᵢᵢ | E₄*E₅ | E_{d} |
| 1915 | E₁ₐEᵢᵢᵢE₄ | AlkLEᵥᵢᵢ | E₄*E₅ | E_{d} |
| 1916 | E_{1b}EᵢᵢᵢE₄ | AlkLEᵥᵢᵢ | E₄*E₅ | E_{d} |
| 1917 | E₁ₐEᵢᵥ | AlkLEᵥᵢᵢ | E₄*E₅ | E_{d} |
| 1918 | E_{1b}Eᵢᵥ | AlkLEᵥᵢᵢ | E₄*E₅ | E_{d} |
| 1919 | E₁ₐEᵢᵥE₄ | AlkLEᵥᵢᵢ | E₄*E₅ | E_{d} |
| 1920 | E_{1b}EᵢᵥE₄ | AlkLEᵥᵢᵢ | E₄*E₅ | E_{d} |
| 1921 | E₁ₐ | Eᵥᵢᵢ | | Eₑ |
| 1922 | E_{1b} | Eᵥᵢᵢ | | Eₑ |
| 1923 | E₁ₐEᵢ | Eᵥᵢᵢ | | Eₑ |
| 1924 | E_{1b}Eᵢ | Eᵥᵢᵢ | | Eₑ |
| 1925 | E₁ₐEᵢᵢ | Eᵥᵢᵢ | | Eₑ |
| 1926 | E_{1b}Eᵢᵢ | Eᵥᵢᵢ | | Eₑ |
| 1927 | E₁ₐEᵢᵢE_{iib} | Eᵥᵢᵢ | | Eₑ |
| 1928 | E_{1b}EᵢᵢE_{iib} | Eᵥᵢᵢ | | Eₑ |
| 1929 | E₁ₐE₄ | Eᵥᵢᵢ | | Eₑ |
| 1930 | E_{1b}E₄ | Eᵥᵢᵢ | | Eₑ |
| 1931 | E₁ₐEᵢE₄ | Eᵥᵢᵢ | | Eₑ |
| 1932 | E_{1b}EᵢE₄ | Eᵥᵢᵢ | | Eₑ |
| 1933 | E₁ₐEᵢᵢE₄ | Eᵥᵢᵢ | | Eₑ |
| 1934 | E_{1b}EᵢᵢE₄ | Eᵥᵢᵢ | | Eₑ |
| 1935 | E₁ₐEᵢᵢE_{iib}E₄ | Eᵥᵢᵢ | | Eₑ |
| 1936 | E_{1b}EᵢᵢE_{iib}E₄ | Eᵥᵢᵢ | | Eₑ |
| 1937 | E₁ₐEᵢᵢᵢ | Eᵥᵢᵢ | | Eₑ |
| 1938 | E_{1b}Eᵢᵢᵢ | Eᵥᵢᵢ | | Eₑ |
| 1939 | E₁ₐEᵢᵢᵢE₄ | Eᵥᵢᵢ | | Eₑ |
| 1940 | E_{1b}EᵢᵢᵢE₄ | Eᵥᵢᵢ | | Eₑ |
| 1941 | E₁ₐEᵢᵥ | Eᵥᵢᵢ | | Eₑ |
| 1942 | E_{1b}Eᵢᵥ | Eᵥᵢᵢ | | Eₑ |
| 1943 | E₁ₐEᵢᵥE₄ | Eᵥᵢᵢ | | Eₑ |
| 1944 | E_{1b}EᵢᵥE₄ | Eᵥᵢᵢ | | Eₑ |
| 1945 | E₁ₐ | Eᵥᵢᵢ | E₄* | Eₑ |
| 1946 | E_{1b} | Eᵥᵢᵢ | E₄* | Eₑ |
| 1947 | E₁ₐEᵢ | Eᵥᵢᵢ | E₄* | Eₑ |
| 1948 | E_{1b}Eᵢ | Eᵥᵢᵢ | E₄* | Eₑ |
| 1949 | E₁ₐEᵢᵢ | Eᵥᵢᵢ | E₄* | Eₑ |
| 1950 | E_{1b}Eᵢᵢ | Eᵥᵢᵢ | E₄* | Eₑ |
| 1951 | E₁ₐEᵢᵢE_{iib} | Eᵥᵢᵢ | E₄* | Eₑ |
| 1952 | E_{1b}EᵢᵢE_{iib} | Eᵥᵢᵢ | E₄* | Eₑ |
| 1953 | E₁ₐE₄ | Eᵥᵢᵢ | E₄* | Eₑ |
| 1954 | E_{1b}E₄ | Eᵥᵢᵢ | E₄* | Eₑ |
| 1955 | E₁ₐEᵢE₄ | Eᵥᵢᵢ | E₄* | Eₑ |
| 1956 | E_{1b}EᵢE₄ | Eᵥᵢᵢ | E₄* | Eₑ |
| 1957 | E₁ₐEᵢᵢE₄ | Eᵥᵢᵢ | E₄* | Eₑ |
| 1958 | E_{1b}EᵢᵢE₄ | Eᵥᵢᵢ | E₄* | Eₑ |
| 1959 | E₁ₐEᵢᵢE_{iib}E₄ | Eᵥᵢᵢ | E₄* | Eₑ |
| 1960 | E_{1b}EᵢᵢE_{iib}E₄ | Eᵥᵢᵢ | E₄* | Eₑ |
| 1961 | E₁ₐEᵢᵢᵢ | Eᵥᵢᵢ | E₄* | Eₑ |
| 1962 | E_{1b}Eᵢᵢᵢ | Eᵥᵢᵢ | E₄* | Eₑ |
| 1963 | E₁ₐEᵢᵢᵢE₄ | Eᵥᵢᵢ | E₄* | Eₑ |
| 1964 | E_{1b}EᵢᵢᵢE₄ | Eᵥᵢᵢ | E₄* | Eₑ |
| 1965 | E₁ₐEᵢᵥ | Eᵥᵢᵢ | E₄* | Eₑ |
| 1966 | E_{1b}Eᵢᵥ | Eᵥᵢᵢ | E₄* | Eₑ |
| 1967 | E₁ₐEᵢᵥE₄ | Eᵥᵢᵢ | E₄* | Eₑ |
| 1968 | E_{1b}EᵢᵥE₄ | Eᵥᵢᵢ | E₄* | Eₑ |
| 1969 | E₁ₐ | Eᵥᵢᵢ | E₅ | Eₑ |
| 1970 | E_{1b} | Eᵥᵢᵢ | E₅ | Eₑ |
| 1971 | E₁ₐEᵢ | Eᵥᵢᵢ | E₅ | Eₑ |
| 1972 | E_{1b}Eᵢ | Eᵥᵢᵢ | E₅ | Eₑ |
| 1973 | E₁ₐEᵢᵢ | Eᵥᵢᵢ | E₅ | Eₑ |
| 1974 | E_{1b}Eᵢᵢ | Eᵥᵢᵢ | E₅ | Eₑ |
| 1975 | E₁ₐEᵢᵢE_{iib} | Eᵥᵢᵢ | E₅ | Eₑ |
| 1976 | E_{1b}EᵢᵢE_{iib} | Eᵥᵢᵢ | E₅ | Eₑ |
| 1977 | E₁ₐE₄ | Eᵥᵢᵢ | E₅ | Eₑ |
| 1978 | E_{1b}E₄ | Eᵥᵢᵢ | E₅ | Eₑ |
| 1979 | E₁ₐEᵢE₄ | Eᵥᵢᵢ | E₅ | Eₑ |
| 1980 | E_{1b}EᵢE₄ | Eᵥᵢᵢ | E₅ | Eₑ |
| 1981 | E₁ₐEᵢᵢE₄ | Eᵥᵢᵢ | E₅ | Eₑ |
| 1982 | E_{1b}EᵢᵢE₄ | Eᵥᵢᵢ | E₅ | Eₑ |
| 1983 | E₁ₐEᵢᵢE_{iib}E₄ | Eᵥᵢᵢ | E₅ | Eₑ |
| 1984 | E_{1b}EᵢᵢE_{iib}E₄ | Eᵥᵢᵢ | E₅ | Eₑ |
| 1985 | E₁ₐEᵢᵢᵢ | Eᵥᵢᵢ | E₅ | Eₑ |
| 1986 | E_{1b}Eᵢᵢᵢ | Eᵥᵢᵢ | E₅ | Eₑ |
| 1987 | E₁ₐEᵢᵢᵢE₄ | Eᵥᵢᵢ | E₅ | Eₑ |
| 1988 | E_{1b}EᵢᵢᵢE₄ | Eᵥᵢᵢ | E₅ | Eₑ |
| 1989 | E₁ₐEᵢᵥ | Eᵥᵢᵢ | E₅ | Eₑ |
| 1990 | E_{1b}Eᵢᵥ | Eᵥᵢᵢ | E₅ | Eₑ |
| 1991 | E₁ₐEᵢᵥE₄ | Eᵥᵢᵢ | E₅ | Eₑ |
| 1992 | E_{1b}EᵢᵥE₄ | Eᵥᵢᵢ | E₅ | Eₑ |
| 1993 | E₁ₐ | Eᵥᵢᵢ | E₄*E₅ | Eₑ |
| 1994 | E_{1b} | Eᵥᵢᵢ | E₄*E₅ | Eₑ |
| 1995 | E₁ₐEᵢ | Eᵥᵢᵢ | E₄*E₅ | Eₑ |
| 1996 | E_{1b}Eᵢ | Eᵥᵢᵢ | E₄*E₅ | Eₑ |
| 1997 | E₁ₐEᵢᵢ | Eᵥᵢᵢ | E₄*E₅ | Eₑ |
| 1998 | E_{1b}Eᵢᵢ | Eᵥᵢᵢ | E₄*E₅ | Eₑ |
| 1999 | E₁ₐEᵢᵢE_{iib} | Eᵥᵢᵢ | E₄*E₅ | Eₑ |
| 2000 | E_{1b}EᵢᵢE_{iib} | Eᵥᵢᵢ | E₄*E₅ | Eₑ |
| 2001 | E₁ₐE₄ | Eᵥᵢᵢ | E₄*E₅ | Eₑ |
| 2002 | E_{1b}E₄ | Eᵥᵢᵢ | E₄*E₅ | Eₑ |
| 2003 | E₁ₐEᵢE₄ | Eᵥᵢᵢ | E₄*E₅ | Eₑ |
| 2004 | E_{1b}EᵢE₄ | Eᵥᵢᵢ | E₄*E₅ | Eₑ |
| 2005 | E₁ₐEᵢᵢE₄ | Eᵥᵢᵢ | E₄*E₅ | Eₑ |
| 2006 | E_{1b}EᵢᵢE₄ | Eᵥᵢᵢ | E₄*E₅ | Eₑ |
| 2007 | E₁ₐEᵢᵢE_{iib}E₄ | Eᵥᵢᵢ | E₄*E₅ | Eₑ |
| 2008 | E_{1b}EᵢᵢE_{iib}E₄ | Eᵥᵢᵢ | E₄*E₅ | Eₑ |
| 2009 | E₁ₐEᵢᵢᵢ | Eᵥᵢᵢ | E₄*E₅ | Eₑ |
| 2010 | E_{1b}Eᵢᵢᵢ | Eᵥᵢᵢ | E₄*E₅ | Eₑ |
| 2011 | E₁ₐEᵢᵢᵢE₄ | Eᵥᵢᵢ | E₄*E₅ | Eₑ |
| 2012 | E_{1b}EᵢᵢᵢE₄ | Eᵥᵢᵢ | E₄*E₅ | Eₑ |
| 2013 | E₁ₐEᵢᵥ | Eᵥᵢᵢ | E₄*E₅ | Eₑ |
| 2014 | E_{1b}Eᵢᵥ | Eᵥᵢᵢ | E₄*E₅ | Eₑ |
| 2015 | E₁ₐEᵢᵥE₄ | Eᵥᵢᵢ | E₄*E₅ | Eₑ |
| 2016 | E_{1b}EᵢᵥE₄ | Eᵥᵢᵢ | E₄*E₅ | Eₑ |
| 2017 | E₁ₐ | AlkLEᵥᵢᵢ | | Eₑ |
| 2018 | E_{1b} | AlkLEᵥᵢᵢ | | Eₑ |
| 2019 | E₁ₐEᵢ | AlkLEᵥᵢᵢ | | Eₑ |
| 2020 | E_{1b}Eᵢ | AlkLEᵥᵢᵢ | | Eₑ |
| 2021 | E₁ₐEᵢᵢ | AlkLEᵥᵢᵢ | | Eₑ |
| 2022 | E_{1b}Eᵢᵢ | AlkLEᵥᵢᵢ | | Eₑ |
| 2023 | E₁ₐEᵢᵢE_{iib} | AlkLEᵥᵢᵢ | | Eₑ |
| 2024 | E_{1b}EᵢᵢE_{iib} | AlkLEᵥᵢᵢ | | Eₑ |
| 2025 | E₁ₐE₄ | AlkLEᵥᵢᵢ | | Eₑ |
| 2026 | E_{1b}E₄ | AlkLEᵥᵢᵢ | | Eₑ |
| 2027 | E₁ₐEᵢE₄ | AlkLEᵥᵢᵢ | | Eₑ |
| 2028 | E_{1b}EᵢE₄ | AlkLEᵥᵢᵢ | | Eₑ |
| 2029 | E₁ₐEᵢᵢE₄ | AlkLEᵥᵢᵢ | | Eₑ |
| 2030 | E_{1b}EᵢᵢE₄ | AlkLEᵥᵢᵢ | | Eₑ |
| 2031 | E₁ₐEᵢᵢE_{iib}E₄ | AlkLEᵥᵢᵢ | | Eₑ |
| 2032 | E_{1b}EᵢᵢE_{iib}E₄ | AlkLEᵥᵢᵢ | | Eₑ |
| 2033 | E₁ₐEᵢᵢᵢ | AlkLEᵥᵢᵢ | | Eₑ |
| 2034 | E_{1b}Eᵢᵢᵢ | AlkLEᵥᵢᵢ | | Eₑ |
| 2035 | E₁ₐEᵢᵢᵢE₄ | AlkLEᵥᵢᵢ | | Eₑ |
| 2036 | E_{1b}EᵢᵢᵢE₄ | AlkLEᵥᵢᵢ | | Eₑ |
| 2037 | E₁ₐEᵢᵥ | AlkLEᵥᵢᵢ | | Eₑ |
| 2038 | E_{1b}Eᵢᵥ | AlkLEᵥᵢᵢ | | Eₑ |
| 2039 | E₁ₐEᵢᵥE₄ | AlkLEᵥᵢᵢ | | Eₑ |
| 2040 | E_{1b}EᵢᵥE₄ | AlkLEᵥᵢᵢ | | Eₑ |
| 2041 | E₁ₐ | AlkLEᵥᵢᵢ | E₄* | Eₑ |
| 2042 | E_{1b} | AlkLEᵥᵢᵢ | E₄* | Eₑ |
| 2043 | E₁ₐEᵢ | AlkLEᵥᵢᵢ | E₄* | Eₑ |
| 2044 | E_{1b}Eᵢ | AlkLEᵥᵢᵢ | E₄* | Eₑ |
| 2045 | E₁ₐEᵢᵢ | AlkLEᵥᵢᵢ | E₄* | Eₑ |
| 2046 | E_{1b}Eᵢᵢ | AlkLEᵥᵢᵢ | E₄* | Eₑ |
| 2047 | E₁ₐEᵢᵢE_{iib} | AlkLEᵥᵢᵢ | E₄* | Eₑ |
| 2048 | E_{1b}EᵢᵢE_{iib} | AlkLEᵥᵢᵢ | E₄* | Eₑ |
| 2049 | E₁ₐE₄ | AlkLEᵥᵢᵢ | E₄* | Eₑ |
| 2050 | E_{1b}E₄ | AlkLEᵥᵢᵢ | E₄* | Eₑ |
| 2051 | E₁ₐEᵢE₄ | AlkLEᵥᵢᵢ | E₄* | Eₑ |
| 2052 | E_{1b}EᵢE₄ | AlkLEᵥᵢᵢ | E₄* | Eₑ |
| 2053 | E₁ₐEᵢᵢE₄ | AlkLEᵥᵢᵢ | E₄* | Eₑ |
| 2054 | E_{1b}EᵢᵢE₄ | AlkLEᵥᵢᵢ | E₄* | Eₑ |
| 2055 | E₁ₐEᵢᵢE_{iib}E₄ | AlkLEᵥᵢᵢ | E₄* | Eₑ |
| 2056 | E_{1b}EᵢᵢE_{iib}E₄ | AlkLEᵥᵢᵢ | E₄* | Eₑ |
| 2057 | E₁ₐEᵢᵢᵢ | AlkLEᵥᵢᵢ | E₄* | Eₑ |
| 2058 | E_{1b}Eᵢᵢᵢ | AlkLEᵥᵢᵢ | E₄* | Eₑ |
| 2059 | E₁ₐEᵢᵢᵢE₄ | AlkLEᵥᵢᵢ | E₄* | Eₑ |
| 2060 | E_{1b}EᵢᵢᵢE₄ | AlkLEᵥᵢᵢ | E₄* | Eₑ |
| 2061 | E₁ₐEᵢᵥ | AlkLEᵥᵢᵢ | E₄* | Eₑ |
| 2062 | E_{1b}Eᵢᵥ | AlkLEᵥᵢᵢ | E₄* | Eₑ |
| 2063 | E₁ₐEᵢᵥE₄ | AlkLEᵥᵢᵢ | E₄* | Eₑ |
| 2064 | E_{1b}EᵢᵥE₄ | AlkLEᵥᵢᵢ | E₄* | Eₑ |
| 2065 | E₁ₐ | AlkLEᵥᵢᵢ | E₅ | Eₑ |
| 2066 | E_{1b} | AlkLEᵥᵢᵢ | E₅ | Eₑ |
| 2067 | E₁ₐEᵢ | AlkLEᵥᵢᵢ | E₅ | Eₑ |
| 2068 | E_{1b}Eᵢ | AlkLEᵥᵢᵢ | E₅ | Eₑ |
| 2069 | E₁ₐEᵢᵢ | AlkLEᵥᵢᵢ | E₅ | Eₑ |
| 2070 | E_{1b}Eᵢᵢ | AlkLEᵥᵢᵢ | E₅ | Eₑ |
| 2071 | E₁ₐEᵢᵢE_{iib} | AlkLEᵥᵢᵢ | E₅ | Eₑ |
| 2072 | E_{1b}EᵢᵢE_{iib} | AlkLEᵥᵢᵢ | E₅ | Eₑ |
| 2073 | E₁ₐE₄ | AlkLEᵥᵢᵢ | E₅ | Eₑ |
| 2074 | E_{1b}E₄ | AlkLEᵥᵢᵢ | E₅ | Eₑ |
| 2075 | E₁ₐEᵢE₄ | AlkLEᵥᵢᵢ | E₅ | Eₑ |
| 2076 | E_{1b}EᵢE₄ | AlkLEᵥᵢᵢ | E₅ | Eₑ |
| 2077 | E₁ₐEᵢᵢE₄ | AlkLEᵥᵢᵢ | E₅ | Eₑ |
| 2078 | E_{1b}EᵢᵢE₄ | AlkLEᵥᵢᵢ | E₅ | Eₑ |
| 2079 | E₁ₐEᵢᵢE_{iib}E₄ | AlkLEᵥᵢᵢ | E₅ | Eₑ |
| 2080 | E_{1b}EᵢᵢE_{iib}E₄ | AlkLEᵥᵢᵢ | E₅ | Eₑ |
| 2081 | E₁ₐEᵢᵢᵢ | AlkLEᵥᵢᵢ | E₅ | Eₑ |
| 2082 | E_{1b}Eᵢᵢᵢ | AlkLEᵥᵢᵢ | E₅ | Eₑ |
| 2083 | E₁ₐEᵢᵢᵢE₄ | AlkLEᵥᵢᵢ | E₅ | Eₑ |
| 2084 | E_{1b}EᵢᵢᵢE₄ | AlkLEᵥᵢᵢ | E₅ | Eₑ |
| 2085 | E₁ₐEᵢᵥ | AlkLEᵥᵢᵢ | E₅ | Eₑ |
| 2086 | E_{1b}Eᵢᵥ | AlkLEᵥᵢᵢ | E₅ | Eₑ |
| 2087 | E₁ₐEᵢᵥE₄ | AlkLEᵥᵢᵢ | E₅ | Eₑ |
| 2088 | E_{1b}EᵢᵥE₄ | AlkLEᵥᵢᵢ | E₅ | Eₑ |
| 2089 | E₁ₐ | AlkLEᵥᵢᵢ | E₄*E₅ | Eₑ |
| 2090 | E_{1b} | AlkLEᵥᵢᵢ | E₄*E₅ | Eₑ |
| 2091 | E₁ₐEᵢ | AlkLEᵥᵢᵢ | E₄*E₅ | Eₑ |
| 2092 | E_{1b}Eᵢ | AlkLEᵥᵢᵢ | E₄*E₅ | Eₑ |
| 2093 | E₁ₐEᵢᵢ | AlkLEᵥᵢᵢ | E₄*E₅ | Eₑ |
| 2094 | E_{1b}Eᵢᵢ | AlkLEᵥᵢᵢ | E₄*E₅ | Eₑ |
| 2095 | E₁ₐEᵢᵢE_{iib} | AlkLEᵥᵢᵢ | E₄*E₅ | Eₑ |
| 2096 | E_{1b}EᵢᵢE_{iib} | AlkLEᵥᵢᵢ | E₄*E₅ | Eₑ |
| 2097 | E₁ₐE₄ | AlkLEᵥᵢᵢ | E₄*E₅ | Eₑ |
| 2098 | E_{1b}E₄ | AlkLEᵥᵢᵢ | E₄*E₅ | Eₑ |
| 2099 | E₁ₐEᵢE₄ | AlkLEᵥᵢᵢ | E₄*E₅ | Eₑ |
| 2100 | E_{1b}EᵢE₄ | AlkLEᵥᵢᵢ | E₄*E₅ | Eₑ |
| 2101 | E₁ₐEᵢᵢE₄ | AlkLEᵥᵢᵢ | E₄*E₅ | Eₑ |
| 2102 | E_{1b}EᵢᵢE₄ | AlkLEᵥᵢᵢ | E₄*E₅ | Eₑ |
| 2103 | E₁ₐEᵢᵢE_{iib}E₄ | AlkLEᵥᵢᵢ | E₄*E₅ | Eₑ |
| 2104 | E_{1b}EᵢᵢE_{iib}E₄ | AlkLEᵥᵢᵢ | E₄*E₅ | Eₑ |
| 2105 | E₁ₐEᵢᵢᵢ | AlkLEᵥᵢᵢ | E₄*E₅ | Eₑ |
| 2106 | E_{1b}Eᵢᵢᵢ | AlkLEᵥᵢᵢ | E₄*E₅ | Eₑ |
| 2107 | E₁ₐEᵢᵢᵢE₄ | AlkLEᵥᵢᵢ | E₄*E₅ | Eₑ |
| 2108 | E_{1b}EᵢᵢᵢE₄ | AlkLEᵥᵢᵢ | E₄*E₅ | Eₑ |
| 2109 | E₁ₐEᵢᵥ | AlkLEᵥᵢᵢ | E₄*E₅ | Eₑ |
| 2110 | E_{1b}Eᵢᵥ | AlkLEᵥᵢᵢ | E₄*E₅ | Eₑ |
| 2111 | E₁ₐEᵢᵥE₄ | AlkLEᵥᵢᵢ | E₄*E₅ | Eₑ |
| 2112 | E_{1b}EᵢᵥE₄ | AlkLEᵥᵢᵢ | E₄*E₅ | Eₑ |
| 2113 | E₁ₐ | Eᵥᵢᵢ | | E_{f} |
| 2114 | E_{1b} | Eᵥᵢᵢ | | E_{f} |
| 2115 | E₁ₐEᵢ | Eᵥᵢᵢ | | E_{f} |
| 2116 | E_{1b}Eᵢ | Eᵥᵢᵢ | | E_{f} |
| 2117 | E₁ₐEᵢᵢ | Eᵥᵢᵢ | | E_{f} |
| 2118 | E_{1b}Eᵢᵢ | Eᵥᵢᵢ | | E_{f} |
| 2119 | E₁ₐEᵢᵢE_{iib} | Eᵥᵢᵢ | | E_{f} |
| 2120 | E_{1b}EᵢᵢE_{iib} | Eᵥᵢᵢ | | E_{f} |
| 2121 | E₁ₐE₄ | Eᵥᵢᵢ | | E_{f} |
| 2122 | E_{1b}E₄ | Eᵥᵢᵢ | | E_{f} |
| 2123 | E₁ₐEᵢE₄ | Eᵥᵢᵢ | | E_{f} |
| 2124 | E_{1b}EᵢE₄ | Eᵥᵢᵢ | | E_{f} |
| 2125 | E₁ₐEᵢᵢE₄ | Eᵥᵢᵢ | | E_{f} |
| 2126 | E_{1b}EᵢᵢE₄ | Eᵥᵢᵢ | | E_{f} |
| 2127 | E₁ₐEᵢᵢE_{iib}E₄ | Eᵥᵢᵢ | | E_{f} |
| 2128 | E_{1b}EᵢᵢE_{iib}E₄ | Eᵥᵢᵢ | | E_{f} |
| 2129 | E₁ₐEᵢᵢᵢ | Eᵥᵢᵢ | | E_{f} |
| 2130 | E_{1b}Eᵢᵢᵢ | Eᵥᵢᵢ | | E_{f} |
| 2131 | E₁ₐEᵢᵢᵢE₄ | Eᵥᵢᵢ | | E_{f} |
| 2132 | E_{1b}EᵢᵢᵢE₄ | Eᵥᵢᵢ | | E_{f} |
| 2133 | E₁ₐEᵢᵥ | Eᵥᵢᵢ | | E_{f} |
| 2134 | E_{1b}Eᵢᵥ | Eᵥᵢᵢ | | E_{f} |
| 2135 | E₁ₐEᵢᵥE₄ | Eᵥᵢᵢ | | E_{f} |
| 2136 | E_{1b}EᵢᵥE₄ | Eᵥᵢᵢ | | E_{f} |
| 2137 | E₁ₐ | Eᵥᵢᵢ | E₄* | E_{f} |
| 2138 | E_{1b} | Eᵥᵢᵢ | E₄* | E_{f} |
| 2139 | E₁ₐEᵢ | Eᵥᵢᵢ | E₄* | E_{f} |
| 2140 | E_{1b}Eᵢ | Eᵥᵢᵢ | E₄* | E_{f} |
| 2141 | E₁ₐEᵢᵢ | Eᵥᵢᵢ | E₄* | E_{f} |
| 2142 | E_{1b}Eᵢᵢ | Eᵥᵢᵢ | E₄* | E_{f} |
| 2143 | E₁ₐEᵢᵢE_{iib} | Eᵥᵢᵢ | E₄* | E_{f} |
| 2144 | E_{1b}EᵢᵢE_{iib} | Eᵥᵢᵢ | E₄* | E_{f} |
| 2145 | E₁ₐE₄ | Eᵥᵢᵢ | E₄* | E_{f} |
| 2146 | E_{1b}E₄ | Eᵥᵢᵢ | E₄* | E_{f} |
| 2147 | E₁ₐEᵢE₄ | Eᵥᵢᵢ | E₄* | E_{f} |
| 2148 | E_{1b}EᵢE₄ | Eᵥᵢᵢ | E₄* | E_{f} |
| 2149 | E₁ₐEᵢᵢE₄ | Eᵥᵢᵢ | E₄* | E_{f} |
| 2150 | E_{1b}EᵢᵢE₄ | Eᵥᵢᵢ | E₄* | E_{f} |
| 2151 | E₁ₐEᵢᵢE_{iib}E₄ | Eᵥᵢᵢ | E₄* | E_{f} |
| 2152 | E_{1b}EᵢᵢE_{iib}E₄ | Eᵥᵢᵢ | E₄* | E_{f} |
| 2153 | E₁ₐEᵢᵢᵢ | Eᵥᵢᵢ | E₄* | E_{f} |
| 2154 | E_{1b}Eᵢᵢᵢ | Eᵥᵢᵢ | E₄* | E_{f} |
| 2155 | E₁ₐEᵢᵢᵢE₄ | Eᵥᵢᵢ | E₄* | E_{f} |
| 2156 | E_{1b}EᵢᵢᵢE₄ | Eᵥᵢᵢ | E₄* | E_{f} |
| 2157 | E₁ₐEᵢᵥ | Eᵥᵢᵢ | E₄* | E_{f} |
| 2158 | E_{1b}Eᵢᵥ | Eᵥᵢᵢ | E₄* | E_{f} |
| 2159 | E₁ₐEᵢᵥE₄ | Eᵥᵢᵢ | E₄* | E_{f} |
| 2160 | E_{1b}EᵢᵥE₄ | Eᵥᵢᵢ | E₄* | E_{f} |
| 2161 | E₁ₐ | Eᵥᵢᵢ | E₅ | E_{f} |
| 2162 | E_{1b} | Eᵥᵢᵢ | E₅ | E_{f} |
| 2163 | E₁ₐEᵢ | Eᵥᵢᵢ | E₅ | E_{f} |
| 2164 | E_{1b}Eᵢ | Eᵥᵢᵢ | E₅ | E_{f} |
| 2165 | E₁ₐEᵢᵢ | Eᵥᵢᵢ | E₅ | E_{f} |
| 2166 | E_{1b}Eᵢᵢ | Eᵥᵢᵢ | E₅ | E_{f} |
| 2167 | E₁ₐEᵢᵢE_{iib} | Eᵥᵢᵢ | E₅ | E_{f} |
| 2168 | E_{1b}EᵢᵢE_{iib} | Eᵥᵢᵢ | E₅ | E_{f} |
| 2169 | E₁ₐE₄ | Eᵥᵢᵢ | E₅ | E_{f} |
| 2170 | E_{1b}E₄ | Eᵥᵢᵢ | E₅ | E_{f} |
| 2171 | E₁ₐEᵢE₄ | Eᵥᵢᵢ | E₅ | E_{f} |
| 2172 | E_{1b}EᵢE₄ | Eᵥᵢᵢ | E₅ | E_{f} |
| 2173 | E₁ₐEᵢᵢE₄ | Eᵥᵢᵢ | E₅ | E_{f} |
| 2174 | E_{1b}EᵢᵢE₄ | Eᵥᵢᵢ | E₅ | E_{f} |
| 2175 | E₁ₐEᵢᵢE_{iib}E₄ | Eᵥᵢᵢ | E₅ | E_{f} |
| 2176 | E_{1b}EᵢᵢE_{iib}E₄ | Eᵥᵢᵢ | E₅ | E_{f} |
| 2177 | E₁ₐEᵢᵢᵢ | Eᵥᵢᵢ | E₅ | E_{f} |
| 2178 | E_{1b}Eᵢᵢᵢ | Eᵥᵢᵢ | E₅ | E_{f} |
| 2179 | E₁ₐEᵢᵢᵢE₄ | Eᵥᵢᵢ | E₅ | E_{f} |
| 2180 | E_{1b}EᵢᵢᵢE₄ | Eᵥᵢᵢ | E₅ | E_{f} |
| 2181 | E₁ₐEᵢᵥ | Eᵥᵢᵢ | E₅ | E_{f} |
| 2182 | E_{1b}Eᵢᵥ | Eᵥᵢᵢ | E₅ | E_{f} |
| 2183 | E₁ₐEᵢᵥE₄ | Eᵥᵢᵢ | E₅ | E_{f} |
| 2184 | E_{1b}EᵢᵥE₄ | Eᵥᵢᵢ | E₅ | E_{f} |
| 2185 | E₁ₐ | Eᵥᵢᵢ | E₄*E₅ | E_{f} |
| 2186 | E_{1b} | Eᵥᵢᵢ | E₄*E₅ | E_{f} |
| 2187 | E₁ₐEᵢ | Eᵥᵢᵢ | E₄*E₅ | E_{f} |
| 2188 | E_{1b}Eᵢ | Eᵥᵢᵢ | E₄*E₅ | E_{f} |
| 2189 | E₁ₐEᵢᵢ | Eᵥᵢᵢ | E₄*E₅ | E_{f} |
| 2190 | E_{1b}Eᵢᵢ | Eᵥᵢᵢ | E₄*E₅ | E_{f} |
| 2191 | E₁ₐEᵢᵢE_{iib} | Eᵥᵢᵢ | E₄*E₅ | E_{f} |
| 2192 | E_{1b}EᵢᵢE_{iib} | Eᵥᵢᵢ | E₄*E₅ | E_{f} |
| 2193 | E₁ₐE₄ | Eᵥᵢᵢ | E₄*E₅ | E_{f} |
| 2194 | E_{1b}E₄ | Eᵥᵢᵢ | E₄*E₅ | E_{f} |
| 2195 | E₁ₐEᵢE₄ | Eᵥᵢᵢ | E₄*E₅ | E_{f} |
| 2196 | E_{1b}EᵢE₄ | Eᵥᵢᵢ | E₄*E₅ | E_{f} |
| 2197 | E₁ₐEᵢᵢE₄ | Eᵥᵢᵢ | E₄*E₅ | E_{f} |
| 2198 | E_{1b}EᵢᵢE₄ | Eᵥᵢᵢ | E₄*E₅ | E_{f} |
| 2199 | E₁ₐEᵢᵢE_{iib}E₄ | Eᵥᵢᵢ | E₄*E₅ | E_{f} |
| 2200 | E_{1b}EᵢᵢE_{iib}E₄ | Eᵥᵢᵢ | E₄*E₅ | E_{f} |
| 2201 | E₁ₐEᵢᵢᵢ | Eᵥᵢᵢ | E₄*E₅ | E_{f} |
| 2202 | E_{1b}Eᵢᵢᵢ | Eᵥᵢᵢ | E₄*E₅ | E_{f} |
| 2203 | E₁ₐEᵢᵢᵢE₄ | Eᵥᵢᵢ | E₄*E₅ | E_{f} |
| 2204 | E_{1b}EᵢᵢᵢE₄ | Eᵥᵢᵢ | E₄*E₅ | E_{f} |
| 2205 | E₁ₐEᵢᵥ | Eᵥᵢᵢ | E₄*E₅ | E_{f} |
| 2206 | E_{1b}Eᵢᵥ | Eᵥᵢᵢ | E₄*E₅ | E_{f} |
| 2207 | E₁ₐEᵢᵥE₄ | Eᵥᵢᵢ | E₄*E₅ | E_{f} |
| 2208 | E_{1b}EᵢᵥE₄ | Eᵥᵢᵢ | E₄*E₅ | E_{f} |
| 2209 | E₁ₐ | AlkLEᵥᵢᵢ | | E_{f} |
| 2210 | E_{1b} | AlkLEᵥᵢᵢ | | E_{f} |
| 2211 | E₁ₐEᵢ | AlkLEᵥᵢᵢ | | E_{f} |
| 2212 | E_{1b}Eᵢ | AlkLEᵥᵢᵢ | | E_{f} |
| 2213 | E₁ₐEᵢᵢ | AlkLEᵥᵢᵢ | | E_{f} |
| 2214 | E_{1b}Eᵢᵢ | AlkLEᵥᵢᵢ | | E_{f} |
| 2215 | E₁ₐEᵢᵢE_{iib} | AlkLEᵥᵢᵢ | | E_{f} |
| 2216 | E_{1b}EᵢᵢE_{iib} | AlkLEᵥᵢᵢ | | E_{f} |
| 2217 | E₁ₐE₄ | AlkLEᵥᵢᵢ | | E_{f} |
| 2218 | E_{1b}E₄ | AlkLEᵥᵢᵢ | | E_{f} |
| 2219 | E₁ₐEᵢE₄ | AlkLEᵥᵢᵢ | | E_{f} |
| 2220 | E_{1b}EᵢE₄ | AlkLEᵥᵢᵢ | | E_{f} |
| 2221 | E₁ₐEᵢᵢE₄ | AlkLEᵥᵢᵢ | | E_{f} |
| 2222 | E_{1b}EᵢᵢE₄ | AlkLEᵥᵢᵢ | | E_{f} |
| 2223 | E₁ₐEᵢᵢE_{iib}E₄ | AlkLEᵥᵢᵢ | | E_{f} |
| 2224 | E_{1b}EᵢᵢE_{iib}E₄ | AlkLEᵥᵢᵢ | | E_{f} |
| 2225 | E₁ₐEᵢᵢᵢ | AlkLEᵥᵢᵢ | | E_{f} |
| 2226 | E_{1b}Eᵢᵢᵢ | AlkLEᵥᵢᵢ | | E_{f} |
| 2227 | E₁ₐEᵢᵢᵢE₄ | AlkLEᵥᵢᵢ | | E_{f} |
| 2228 | E_{1b}EᵢᵢᵢE₄ | AlkLEᵥᵢᵢ | | E_{f} |
| 2229 | E₁ₐEᵢᵥ | AlkLEᵥᵢᵢ | | E_{f} |
| 2230 | E_{1b}Eᵢᵥ | AlkLEᵥᵢᵢ | | E_{f} |
| 2231 | E₁ₐEᵢᵥE₄ | AlkLEᵥᵢᵢ | | E_{f} |
| 2232 | E_{1b}EᵢᵥE₄ | AlkLEᵥᵢᵢ | | E_{f} |
| 2233 | E₁ₐ | AlkLEᵥᵢᵢ | E₄* | E_{f} |
| 2234 | E_{1b} | AlkLEᵥᵢᵢ | E₄* | E_{f} |
| 2235 | E₁ₐEᵢ | AlkLEᵥᵢᵢ | E₄* | E_{f} |
| 2236 | E_{1b}Eᵢ | AlkLEᵥᵢᵢ | E₄* | E_{f} |
| 2237 | E₁ₐEᵢᵢ | AlkLEᵥᵢᵢ | E₄* | E_{f} |
| 2238 | E_{1b}Eᵢᵢ | AlkLEᵥᵢᵢ | E₄* | E_{f} |
| 2239 | E₁ₐEᵢᵢE_{iib} | AlkLEᵥᵢᵢ | E₄* | E_{f} |
| 2240 | E_{1b}EᵢᵢE_{iib} | AlkLEᵥᵢᵢ | E₄* | E_{f} |
| 2241 | E₁ₐE₄ | AlkLEᵥᵢᵢ | E₄* | E_{f} |
| 2242 | E_{1b}E₄ | AlkLEᵥᵢᵢ | E₄* | E_{f} |
| 2243 | E₁ₐEᵢE₄ | AlkLEᵥᵢᵢ | E₄* | E_{f} |
| 2244 | E_{1b}EᵢE₄ | AlkLEᵥᵢᵢ | E₄* | E_{f} |
| 2245 | E₁ₐEᵢᵢE₄ | AlkLEᵥᵢᵢ | E₄* | E_{f} |
| 2246 | E_{1b}EᵢᵢE₄ | AlkLEᵥᵢᵢ | E₄* | E_{f} |
| 2247 | E₁ₐEᵢᵢE_{iib}E₄ | AlkLEᵥᵢᵢ | E₄* | E_{f} |
| 2248 | E_{1b}EᵢᵢE_{iib}E₄ | AlkLEᵥᵢᵢ | E₄* | E_{f} |
| 2249 | E₁ₐEᵢᵢᵢ | AlkLEᵥᵢᵢ | E₄* | E_{f} |
| 2250 | E_{1b}Eᵢᵢᵢ | AlkLEᵥᵢᵢ | E₄* | E_{f} |
| 2251 | E₁ₐEᵢᵢᵢE₄ | AlkLEᵥᵢᵢ | E₄* | E_{f} |
| 2252 | E_{1b}EᵢᵢᵢE₄ | AlkLEᵥᵢᵢ | E₄* | E_{f} |
| 2253 | E₁ₐEᵢᵥ | AlkLEᵥᵢᵢ | E₄* | E_{f} |
| 2254 | E_{1b}Eᵢᵥ | AlkLEᵥᵢᵢ | E₄* | E_{f} |
| 2255 | E₁ₐEᵢᵥE₄ | AlkLEᵥᵢᵢ | E₄* | E_{f} |
| 2256 | E_{1b}EᵢᵥE₄ | AlkLEᵥᵢᵢ | E₄* | E_{f} |
| 2257 | E₁ₐ | AlkLEᵥᵢᵢ | E₅ | E_{f} |
| 2258 | E_{1b} | AlkLEᵥᵢᵢ | E₅ | E_{f} |
| 2259 | E₁ₐEᵢ | AlkLEᵥᵢᵢ | E₅ | E_{f} |
| 2260 | E_{1b}Eᵢ | AlkLEᵥᵢᵢ | E₅ | E_{f} |
| 2261 | E₁ₐEᵢᵢ | AlkLEᵥᵢᵢ | E₅ | E_{f} |
| 2262 | E_{1b}Eᵢᵢ | AlkLEᵥᵢᵢ | E₅ | E_{f} |
| 2263 | E₁ₐEᵢᵢE_{iib} | AlkLEᵥᵢᵢ | E₅ | E_{f} |
| 2264 | E_{1b}EᵢᵢE_{iib} | AlkLEᵥᵢᵢ | E₅ | E_{f} |
| 2265 | E₁ₐE₄ | AlkLEᵥᵢᵢ | E₅ | E_{f} |
| 2266 | E_{1b}E₄ | AlkLEᵥᵢᵢ | E₅ | E_{f} |
| 2267 | E₁ₐEᵢE₄ | AlkLEᵥᵢᵢ | E₅ | E_{f} |
| 2268 | E_{1b}EᵢE₄ | AlkLEᵥᵢᵢ | E₅ | E_{f} |
| 2269 | E₁ₐEᵢᵢE₄ | AlkLEᵥᵢᵢ | E₅ | E_{f} |
| 2270 | E_{1b}EᵢᵢE₄ | AlkLEᵥᵢᵢ | E₅ | E_{f} |
| 2271 | E₁ₐEᵢᵢE_{iib}E₄ | AlkLEᵥᵢᵢ | E₅ | E_{f} |
| 2272 | E_{1b}EᵢᵢE_{iib}E₄ | AlkLEᵥᵢᵢ | E₅ | E_{f} |
| 2273 | E₁ₐEᵢᵢᵢ | AlkLEᵥᵢᵢ | E₅ | E_{f} |
| 2274 | E_{1b}Eᵢᵢᵢ | AlkLEᵥᵢᵢ | E₅ | E_{f} |
| 2275 | E₁ₐEᵢᵢᵢE₄ | AlkLEᵥᵢᵢ | E₅ | E_{f} |
| 2276 | E_{1b}EᵢᵢᵢE₄ | AlkLEᵥᵢᵢ | E₅ | E_{f} |
| 2277 | E₁ₐEᵢᵥ | AlkLEᵥᵢᵢ | E₅ | E_{f} |
| 2278 | E_{1b}Eᵢᵥ | AlkLEᵥᵢᵢ | E₅ | E_{f} |
| 2279 | E₁ₐEᵢᵥE₄ | AlkLEᵥᵢᵢ | E₅ | E_{f} |
| 2280 | E_{1b}EᵢᵥE₄ | AlkLEᵥᵢᵢ | E₅ | E_{f} |
| 2281 | E₁ₐ | AlkLEᵥᵢᵢ | E₄*E₅ | E_{f} |
| 2282 | E_{1b} | AlkLEᵥᵢᵢ | E₄*E₅ | E_{f} |
| 2283 | E₁ₐEᵢ | AlkLEᵥᵢᵢ | E₄*E₅ | E_{f} |
| 2284 | E_{1b}Eᵢ | AlkLEᵥᵢᵢ | E₄*E₅ | E_{f} |
| 2285 | E₁ₐEᵢᵢ | AlkLEᵥᵢᵢ | E₄*E₅ | E_{f} |
| 2286 | E_{1b}Eᵢᵢ | AlkLEᵥᵢᵢ | E₄*E₅ | E_{f} |
| 2287 | E₁ₐEᵢᵢE_{iib} | AlkLEᵥᵢᵢ | E₄*E₅ | E_{f} |
| 2288 | E_{1b}EᵢᵢE_{iib} | AlkLEᵥᵢᵢ | E₄*E₅ | E_{f} |
| 2289 | E₁ₐE₄ | AlkLEᵥᵢᵢ | E₄*E₅ | E_{f} |
| 2290 | E_{1b}E₄ | AlkLEᵥᵢᵢ | E₄*E₅ | E_{f} |
| 2291 | E₁ₐEᵢE₄ | AlkLEᵥᵢᵢ | E₄*E₅ | E_{f} |
| 2292 | E_{1b}EᵢE₄ | AlkLEᵥᵢᵢ | E₄*E₅ | E_{f} |
| 2293 | E₁ₐEᵢᵢE₄ | AlkLEᵥᵢᵢ | E₄*E₅ | E_{f} |
| 2294 | E_{1b}EᵢᵢE₄ | AlkLEᵥᵢᵢ | E₄*E₅ | E_{f} |
| 2295 | E₁ₐEᵢᵢE_{iib}E₄ | AlkLEᵥᵢᵢ | E₄*E₅ | E_{f} |
| 2296 | E_{1b}EᵢᵢE_{iib}E₄ | AlkLEᵥᵢᵢ | E₄*E₅ | E_{f} |
| 2297 | E₁ₐEᵢᵢᵢ | AlkLEᵥᵢᵢ | E₄*E₅ | E_{f} |
| 2298 | E_{1b}Eᵢᵢᵢ | AlkLEᵥᵢᵢ | E₄*E₅ | E_{f} |
| 2299 | E₁ₐEᵢᵢᵢE₄ | AlkLEᵥᵢᵢ | E₄*E₅ | E_{f} |
| 2300 | E_{1b}EᵢᵢᵢE₄ | AlkLEᵥᵢᵢ | E₄*E₅ | E_{f} |
| 2301 | E₁ₐEᵢᵥ | AlkLEᵥᵢᵢ | E₄*E₅ | E_{f} |
| 2302 | E_{1b}Eᵢᵥ | AlkLEᵥᵢᵢ | E₄*E₅ | E_{f} |
| 2303 | E₁ₐEᵢᵥE₄ | AlkLEᵥᵢᵢ | E₄*E₅ | E_{f} |
| 2304 | E_{1b}EᵢᵥE₄ | AlkLEᵥᵢᵢ | E₄*E₅ | E_{f} |

[0195] Microorganisms quite especially preferred according to the invention (abbreviated as MO) are outstandingly suitable for the production of ω-carboxycarboxylic acids and have increased or decreased enzyme activities (abbreviated as E) described in the following table, where these can in addition advantageously be combined with an increased enzyme activity compared to the wild type of the microorganism, which is described for the 3-ketoacyl-ACP (Acyl Carrrier Protein) synthase III (EC 2.3.1.41), in particular that from plants, preferably that from plants the seeds whereof contain fatty acids with alkyl residues shorter than 14 C atoms, and particularly preferably that from plants of the genera Cuphea, Elaeis, Cocos, Umbellularia and Cinnamomum and gene products selected from AccA, AccB, AccC, AccD, AceE, AceF, Lpd, AcpP, FabA, FabB, FabD, FabF, FabG, FabH, Fabl, FabZ, PanD, PanK, UdhA, PntA or PntB.

[0196] Any combinations of at least two of these enzyme activities can advantageously be increased.

[0197] In addition, moreover, it can be advantageous if the microorganism is provided with a lower enzyme activity compared to the wild type of the microorganism, which is described for the gene products selected from TdcE, PflA, PflB, PflC, PflD, PoxB, YgfG, AckA, AckB, TdcD, Pta, LdhA, AdhE, MgsA, FdnG, FdnH, FdnI, FdhF, FdoG, FdoH, FdoI, PrpC, PrpD, PrpF, PrpB, TdcD, Pdc, PorA, PorB, PorC, PorD, AlsS, IlvB, IlvM, IlvN, IlvG, IlyI, IlvH, AlsD, ButB, Thl, ThlA, ThlB, PhaA, PhaB, Crt, BdhA, BdhB, Adc, Adh, CtfB, AtoA, AtoD, LdhL, GltA, FabR, FhuA, Dld, LldA or LldP, singly or in any combination.

| | | |
|---|---|---|
| MO | E increased | E decreased |

| | | | | |
|---|---|---|---|---|
| 1 | E₁ₐ | | | |
| 2 | E_{1b} | | | |
| 3 | E₁ₐE₅ | | | |
| 4 | E_{1b}E₅ | | | |
| 5 | E₁ₐEᵢ | | | |
| 6 | E_{1b}Eᵢ | | | |
| 7 | E₁ₐEᵢᵢ | | | |
| 8 | E_{1b}Eᵢᵢ | | | |
| 9 | E₁ₐEᵢᵢE_{iib} | | | |
| 10 | E_{1b}EᵢᵢE_{iib} | | | |
| 11 | E₁ₐE₅Eᵢ | | | |
| 12 | E_{1b}E₅Eᵢ | | | |
| 13 | E₁ₐE₅Eᵢᵢ | | | |
| 14 | E_{1b}E₅Eᵢᵢ | | | |
| 15 | E₁ₐE₅EᵢᵢE_{iib} | | | |
| 16 | E_{1b}E₅EᵢᵢE_{iib} | | | |
| 17 | E₁ₐE₄ | | | |
| 18 | E_{1b}E₄ | | | |
| 19 | E₁ₐE₅E₄ | | | |
| 20 | E_{1b}E₅E₄ | | | |
| 21 | E₁ₐEᵢE₄ | | | |
| 22 | E_{1b}EᵢE₄ | | | |
| 23 | E₁ₐEᵢᵢE₄ | | | |
| 24 | E_{1b}EᵢᵢE₄ | | | |
| 25 | E₁ₐEᵢᵢE_{iib}E₄ | | | |
| 26 | E_{1b}EᵢᵢE_{iib}E₄ | | | |
| 27 | E₁ₐE₅EᵢE₄ | | | |
| 28 | E_{1b}E₅EᵢE₄ | | | |
| 29 | E₁ₐE₅EᵢᵢE₄ | | | |
| 30 | E_{1b}E₅EᵢᵢE₄ | | | |
| 31 | E₁ₐE₅EᵢᵢE_{iib}E₄ | | | |
| 32 | E_{1b}E₅EᵢᵢE_{iib}E₄ | | | |
| 33 | E₁ₐEᵢᵢᵢ | | | |
| 34 | E_{1b}Eᵢᵢᵢ | | | |
| 35 | E₁ₐE₅Eᵢᵢᵢ | | | |
| 36 | E_{1b}E₅Eᵢᵢᵢ | | | |
| 37 | E₁ₐEᵢᵢᵢE₄ | | | |
| 38 | E_{1b}EᵢᵢᵢE₄ | | | |
| 39 | E₁ₐE₅EᵢᵢᵢE₄ | | | |
| 40 | E_{1b}E₅EᵢᵢᵢE₄ | | | |
| 41 | E₁ₐEᵢᵥ | | | |
| 42 | E_{1b}Eᵢᵥ | | | |
| 43 | E₁ₐE₅Eᵢᵥ | | | |
| 44 | E_{1b}E₅Eᵢᵥ | | | |
| 45 | E₁ₐEᵢᵥE₄ | | | |
| 46 | E_{1b}EᵢᵥE₄ | | | |
| 47 | E₁ₐE₅EᵢᵥE₄ | | | |
| 48 | E_{1b}E₅EᵢᵥE₄ | | | |
| 49 | E₁ₐ | | E₄* | |
| 50 | E_{1b} | | E₄* | |
| 51 | E₁ₐE₅ | | E₄* | |
| 52 | E_{1b}E₅ | | E₄* | |
| 53 | E₁ₐEᵢ | | E₄* | |
| 54 | E_{1b}Eᵢ | | E₄* | |
| 55 | E₁ₐEᵢᵢ | | E₄* | |
| 56 | E_{1b}Eᵢᵢ | | E₄* | |
| 57 | E₁ₐEᵢᵢE_{iib} | | E₄* | |
| 58 | E_{1b}EᵢᵢE_{iib} | | E₄* | |
| 59 | E₁ₐE₅Eᵢ | | E₄* | |
| 60 | E_{1b}E₅Eᵢ | | E₄* | |
| 61 | E₁ₐE₅Eᵢᵢ | | E₄* | |
| 62 | E_{1b}E₅Eᵢᵢ | | E₄* | |
| 63 | E₁ₐE₅EᵢᵢE_{iib} | | E₄* | |
| 64 | E_{1b}E₅EᵢᵢE_{iib} | | E₄* | |
| 65 | E₁ₐE₄ | | E₄* | |
| 66 | E_{1b}E₄ | | E₄* | |
| 67 | E₁ₐE₅E₄ | | E₄* | |
| 68 | E_{1b}E₅E₄ | | E₄* | |
| 69 | E₁ₐEᵢE₄ | | E₄* | |
| 70 | E_{1b}EᵢE₄ | | E₄* | |
| 71 | E₁ₐEᵢᵢE₄ | | E₄* | |
| 72 | E_{1b}EᵢᵢE₄ | | E₄* | |
| 73 | E₁ₐEᵢᵢE_{iib}E₄ | | E₄* | |
| 74 | E_{1b}EᵢᵢE_{iib}E₄ | | E₄* | |
| 75 | E₁ₐE₅EᵢE₄ | | E₄* | |
| 76 | E_{1b}E₅EᵢE₄ | | E₄* | |
| 77 | E₁ₐE₅EᵢᵢE₄ | | E₄* | |
| 78 | E_{1b}E₅EᵢᵢE₄ | | E₄* | |
| 79 | E₁ₐE₅EᵢᵢE_{iib}E₄ | | E₄* | |
| 80 | E_{1b}E₅EᵢᵢE_{iib}E₄ | | E₄* | |
| 81 | E₁ₐEᵢᵢᵢ | | E₄* | |
| 82 | E_{1b}Eᵢᵢᵢ | | E₄* | |
| 83 | E₁ₐE₅Eᵢᵢᵢ | | E₄* | |
| 84 | E_{1b}E₅Eᵢᵢᵢ | | E₄* | |
| 85 | E₁ₐEᵢᵢᵢE₄ | | E₄* | |
| 86 | E_{1b}EᵢᵢᵢE₄ | | E₄* | |
| 87 | E₁ₐE₅EᵢᵢᵢE₄ | | E₄* | |
| 88 | E_{1b}E₅EᵢᵢᵢE₄ | | E₄* | |
| 89 | E₁ₐEᵢᵥ | | E₄* | |
| 90 | E_{1b}Eᵢᵥ | | E₄* | |
| 91 | E₁ₐE₅Eᵢᵥ | | E₄* | |
| 92 | E_{1b}E₅Eᵢᵥ | | E₄* | |
| 93 | E₁ₐEᵢᵥE₄ | | E₄* | |
| 94 | E_{1b}EᵢᵥE₄ | | E₄* | |
| 95 | E₁ₐE₅EᵢᵥE₄ | | E₄* | |
| 96 | E_{1b}E₅EᵢᵥE₄ | | E₄* | |
| 97 | E₁ₐ | AlkL | | |
| 98 | E_{1b} | AlkL | | |
| 99 | E₁ₐE₅ | AlkL | | |
| 100 | E_{1b}E₅ | AlkL | | |
| 101 | E₁ₐEᵢ | AlkL | | |
| 102 | E_{1b}Eᵢ | AlkL | | |
| 103 | E₁ₐEᵢᵢ | AlkL | | |
| 104 | E_{1b}Eᵢᵢ | AlkL | | |
| 105 | E₁ₐEᵢᵢE_{iib} | AlkL | | |
| 106 | E_{1b}EᵢᵢE_{iib} | AlkL | | |
| 107 | E₁ₐE₅Eᵢ | AlkL | | |
| 108 | E_{1b}E₅Eᵢ | AlkL | | |
| 109 | E₁ₐE₅Eᵢᵢ | AlkL | | |
| 110 | E_{1b}E₅Eᵢᵢ | AlkL | | |
| 111 | E₁ₐE₅EᵢᵢE_{iib} | AlkL | | |
| 112 | E_{1b}E₅EᵢᵢE_{iib} | AlkL | | |
| 113 | E₁ₐE₄ | AlkL | | |
| 114 | E_{1b}E₄ | AlkL | | |
| 115 | E₁ₐE₅E₄ | AlkL | | |
| 116 | E_{1b}E₅E₄ | AlkL | | |
| 117 | E₁ₐEᵢE₄ | AlkL | | |
| 118 | E_{1b}EᵢE₄ | AlkL | | |
| 119 | E₁ₐEᵢᵢE₄ | AlkL | | |
| 120 | E_{1b}EᵢᵢE₄ | AlkL | | |
| 121 | E₁ₐEᵢᵢE_{iib}E₄ | AlkL | | |
| 122 | E_{1b}EᵢᵢE_{iib}E₄ | AlkL | | |
| 123 | E₁ₐE₅EᵢE₄ | AlkL | | |
| 124 | E_{1b}E₅EᵢE₄ | AlkL | | |
| 125 | E₁ₐE₅EᵢᵢE₄ | AlkL | | |
| 126 | E_{1b}E₅EᵢᵢE₄ | AlkL | | |
| 127 | E₁ₐE₅EᵢᵢE_{iib}E₄ | AlkL | | |
| 128 | E_{1b}E₅EᵢᵢE_{iib}E₄ | AlkL | | |
| 129 | E₁ₐEᵢᵢᵢ | AlkL | | |
| 130 | E_{1b}Eᵢᵢᵢ | AlkL | | |
| 131 | E₁ₐE₅Eᵢᵢᵢ | AlkL | | |
| 132 | E_{1b}E₅Eᵢᵢᵢ | AlkL | | |
| 133 | E₁ₐEᵢᵢᵢE₄ | AlkL | | |
| 134 | E_{1b}EᵢᵢᵢE₄ | AlkL | | |
| 135 | E₁ₐE₅EᵢᵢᵢE₄ | AlkL | | |
| 136 | E_{1b}E₅EᵢᵢᵢE₄ | AlkL | | |
| 137 | E₁ₐEᵢᵥ | AlkL | | |
| 138 | E_{1b}Eᵢᵥ | AlkL | | |
| 139 | E₁ₐE₅Eᵢᵥ | AlkL | | |
| 140 | E_{1b}E₅Eᵢᵥ | AlkL | | |
| 141 | E₁ₐEᵢᵥE₄ | AlkL | | |
| 142 | E_{1b}EᵢᵥE₄ | AlkL | | |
| 143 | E₁ₐE₅EᵢᵥE₄ | AlkL | | |
| 144 | E_{1b}E₅EᵢᵥE₄ | AlkL | | |
| 145 | E₁ₐ | AlkL | E₄* | |
| 146 | E_{1b} | AlkL | E₄* | |
| 147 | E₁ₐE₅ | AlkL | E₄* | |
| 148 | E_{1b}E₅ | AlkL | E₄* | |
| 149 | E₁ₐEᵢ | AlkL | E₄* | |
| 150 | E_{1b}Eᵢ | AlkL | E₄* | |
| 151 | E₁ₐEᵢᵢ | AlkL | E₄* | |
| 152 | E_{1b}Eᵢᵢ | AlkL | E₄* | |
| 153 | E₁ₐEᵢᵢE_{iib} | AlkL | E₄* | |
| 154 | E_{1b}EᵢᵢE_{iib} | AlkL | E₄* | |
| 155 | E₁ₐE₅Eᵢ | AlkL | E₄* | |
| 156 | E_{1b}E₅Eᵢ | AlkL | E₄* | |
| 157 | E₁ₐE₅Eᵢᵢ | AlkL | E₄* | |
| 158 | E_{1b}E₅Eᵢᵢ | AlkL | E₄* | |
| 159 | E₁ₐE₅EᵢᵢE_{iib} | AlkL | E₄* | |
| 160 | E_{1b}E₅EᵢᵢE_{iib} | AlkL | E₄* | |
| 161 | E₁ₐE₄ | AlkL | E₄* | |
| 162 | E_{1b}E₄ | AlkL | E₄* | |
| 163 | E₁ₐE₅E₄ | AlkL | E₄* | |
| 164 | E_{1b}E₅E₄ | AlkL | E₄* | |
| 165 | E₁ₐEᵢE₄ | AlkL | E₄* | |
| 166 | E_{1b}EᵢE₄ | AlkL | E₄* | |
| 167 | E₁ₐEᵢᵢE₄ | AlkL | E₄* | |
| 168 | E_{1b}EᵢᵢE₄ | AlkL | E₄* | |
| 169 | E₁ₐEᵢᵢE_{iib}E₄ | AlkL | E₄* | |
| 170 | E_{1b}EᵢᵢE_{iib}E₄ | AlkL | E₄* | |
| 171 | E₁ₐE₅EᵢE₄ | AlkL | E₄* | |
| 172 | E_{1b}E₅EᵢE₄ | AlkL | E₄* | |
| 173 | E₁ₐE₅EᵢᵢE₄ | AlkL | E₄* | |
| 174 | E_{1b}E₅EᵢᵢE₄ | AlkL | E₄* | |
| 175 | E₁ₐE₅EᵢᵢE_{iib}E₄ | AlkL | E₄* | |
| 176 | E_{1b}E₅EᵢᵢE_{iib}E₄ | AlkL | E₄* | |
| 177 | E₁ₐEᵢᵢᵢ | AlkL | E₄* | |
| 178 | E_{1b}Eᵢᵢᵢ | AlkL | E₄* | |
| 179 | E₁ₐE₅Eᵢᵢᵢ | AlkL | E₄* | |
| 180 | E_{1b}E₅Eᵢᵢᵢ | AlkL | E₄* | |
| 181 | E₁ₐEᵢᵢᵢE₄ | AlkL | E₄* | |
| 182 | E_{1b}EᵢᵢᵢE₄ | AlkL | E₄* | |
| 183 | E₁ₐE₅EᵢᵢᵢE₄ | AlkL | E₄* | |
| 184 | E_{1b}E₅EᵢᵢᵢE₄ | AlkL | E₄* | |
| 185 | E₁ₐEᵢᵥ | AlkL | E₄* | |
| 186 | E_{1b}Eᵢᵥ | AlkL | E₄* | |
| 187 | E₁ₐE₅Eᵢᵥ | AlkL | E₄* | |
| 188 | E_{1b}E₅Eᵢᵥ | AlkL | E₄* | |
| 189 | E₁ₐEᵢᵥE₄ | AlkL | E₄* | |
| 190 | E_{1b}EᵢᵥE₄ | AlkL | E₄* | |
| 191 | E₁ₐE₅EᵢᵥE₄ | AlkL | E₄* | |
| 192 | E_{1b}E₅EᵢᵥE₄ | AlkL | E₄* | |
| 193 | E₁ₐ | | | Eₐ |
| 194 | E_{1b} | | | Eₐ |
| 195 | E₁ₐE₅ | | | Eₐ |
| 196 | E_{1b}E₅ | | | Eₐ |
| 197 | E₁ₐEᵢ | | | Eₐ |
| 198 | E_{1b}Eᵢ | | | Eₐ |
| 199 | E₁ₐEᵢᵢ | | | Eₐ |
| 200 | E_{1b}Eᵢᵢ | | | Eₐ |
| 201 | E₁ₐEᵢᵢE_{iib} | | | Eₐ |
| 202 | E_{1b}EᵢᵢE_{iib} | | | Eₐ |
| 203 | E₁ₐE₅Eᵢ | | | Eₐ |
| 204 | E_{1b}E₅Eᵢ | | | Eₐ |
| 205 | E₁ₐE₅Eᵢᵢ | | | Eₐ |
| 206 | E_{1b}E₅Eᵢᵢ | | | Eₐ |
| 207 | E₁ₐE₅EᵢᵢE_{iib} | | | Eₐ |
| 208 | E_{1b}E₅EᵢᵢE_{iib} | | | Eₐ |
| 209 | E₁ₐE₄ | | | Eₐ |
| 210 | E_{1b}E₄ | | | Eₐ |
| 211 | E₁ₐE₅E₄ | | | Eₐ |
| 212 | E_{1b}E₅E₄ | | | Eₐ |
| 213 | E₁ₐEᵢE₄ | | | Eₐ |
| 214 | E_{1b}EᵢE₄ | | | Eₐ |
| 215 | E₁ₐEᵢᵢE₄ | | | Eₐ |
| 216 | E_{1b}EᵢᵢE₄ | | | Eₐ |
| 217 | E₁ₐEᵢᵢE_{iib}E₄ | | | Eₐ |
| 218 | E_{1b}EᵢᵢE_{iib}E₄ | | | Eₐ |
| 219 | E₁ₐE₅EᵢE₄ | | | Eₐ |
| 220 | E_{1b}E₅EᵢE₄ | | | Eₐ |
| 221 | E₁ₐE₅EᵢᵢE₄ | | | Eₐ |
| 222 | E_{1b}E₅EᵢᵢE₄ | | | Eₐ |
| 223 | E₁ₐE₅EᵢᵢE_{iib}E₄ | | | Eₐ |
| 224 | E_{1b}E₅EᵢᵢE_{iib}E₄ | | | Eₐ |
| 225 | E₁ₐEᵢᵢᵢ | | | Eₐ |
| 226 | E_{1b}Eᵢᵢᵢ | | | Eₐ |
| 227 | E₁ₐE₅Eᵢᵢᵢ | | | Eₐ |
| 228 | E_{1b}E₅Eᵢᵢᵢ | | | Eₐ |
| 229 | E₁ₐEᵢᵢᵢE₄ | | | Eₐ |
| 230 | E_{1b}EᵢᵢᵢE₄ | | | Eₐ |
| 231 | E₁ₐE₅EᵢᵢᵢE₄ | | | Eₐ |
| 232 | E_{1b}E₅EᵢᵢᵢE₄ | | | Eₐ |
| 233 | E₁ₐEᵢᵥ | | | Eₐ |
| 234 | E_{1b}Eᵢᵥ | | | Eₐ |
| 235 | E₁ₐE₅Eᵢᵥ | | | Eₐ |
| 236 | E_{1b}E₅Eᵢᵥ | | | Eₐ |
| 237 | E₁ₐEᵢᵥE₄ | | | Eₐ |
| 238 | E_{1b}EᵢᵥE₄ | | | Eₐ |
| 239 | E₁ₐE₅EᵢᵥE₄ | | | Eₐ |
| 240 | E_{1b}E₅EᵢᵥE₄ | | | Eₐ |
| 241 | E₁ₐ | | E₄* | Eₐ |
| 242 | E_{1b} | | E₄* | Eₐ |
| 243 | E₁ₐE₅ | | E₄* | Eₐ |
| 244 | E_{1b}E₅ | | E₄* | Eₐ |
| 245 | E₁ₐEᵢ | | E₄* | Eₐ |
| 246 | E_{1b}Eᵢ | | E₄* | Eₐ |
| 247 | E₁ₐEᵢᵢ | | E₄* | Eₐ |
| 248 | E_{1b}Eᵢᵢ | | E₄* | Eₐ |
| 249 | E₁ₐEᵢᵢE_{iib} | | E₄* | Eₐ |
| 250 | E_{1b}EᵢᵢE_{iib} | | E₄* | Eₐ |
| 251 | E₁ₐE₅Eᵢ | | E₄* | Eₐ |
| 252 | E_{1b}E₅Eᵢ | | E₄* | Eₐ |
| 253 | E₁ₐE₅Eᵢᵢ | | E₄* | Eₐ |
| 254 | E_{1b}E₅Eᵢᵢ | | E₄* | Eₐ |
| 255 | E₁ₐE₅EᵢᵢE_{iib} | | E₄* | Eₐ |
| 256 | E_{1b}E₅EᵢᵢE_{iib} | | E₄* | Eₐ |
| 257 | E₁ₐE₄ | | E₄* | Eₐ |
| 258 | E_{1b}E₄ | | E₄* | Eₐ |
| 259 | E₁ₐE₅E₄ | | E₄* | Eₐ |
| 260 | E_{1b}E₅E₄ | | E₄* | Eₐ |
| 261 | E₁ₐEᵢE₄ | | E₄* | Eₐ |
| 262 | E_{1b}EᵢE₄ | | E₄* | Eₐ |
| 263 | E₁ₐEᵢᵢE₄ | | E₄* | Eₐ |
| 264 | E_{1b}EᵢᵢE₄ | | E₄* | Eₐ |
| 265 | E₁ₐEᵢᵢE_{iib}E₄ | | E₄* | Eₐ |
| 266 | E_{1b}EᵢᵢE_{iib}E₄ | | E₄* | Eₐ |
| 267 | E₁ₐE₅EᵢE₄ | | E₄* | Eₐ |
| 268 | E_{1b}E₅EᵢE₄ | | E₄* | Eₐ |
| 269 | E₁ₐE₅EᵢᵢE₄ | | E₄* | Eₐ |
| 270 | E_{1b}E₅EᵢᵢE₄ | | E₄* | Eₐ |
| 271 | E₁ₐE₅EᵢᵢE_{iib}E₄ | | E₄* | Eₐ |
| 272 | E_{1b}E₅EᵢᵢE_{iib}E₄ | | E₄* | Eₐ |
| 273 | E₁ₐEᵢᵢᵢ | | E₄* | Eₐ |
| 274 | E_{1b}Eᵢᵢᵢ | | E₄* | Eₐ |
| 275 | E₁ₐE₅Eᵢᵢᵢ | | E₄* | Eₐ |
| 276 | E_{1b}E₅Eᵢᵢᵢ | | E₄* | Eₐ |
| 277 | E₁ₐEᵢᵢᵢE₄ | | E₄* | Eₐ |
| 278 | E_{1b}EᵢᵢᵢE₄ | | E₄* | Eₐ |
| 279 | E₁ₐE₅EᵢᵢᵢE₄ | | E₄* | Eₐ |
| 280 | E_{1b}E₅EᵢᵢᵢE₄ | | E₄* | Eₐ |
| 281 | E₁ₐEᵢᵥ | | E₄* | Eₐ |
| 282 | E_{1b}Eᵢᵥ | | E₄* | Eₐ |
| 283 | E₁ₐE₅Eᵢᵥ | | E₄* | Eₐ |
| 284 | E_{1b}E₅Eᵢᵥ | | E₄* | Eₐ |
| 285 | E₁ₐEᵢᵥE₄ | | E₄* | Eₐ |
| 286 | E_{1b}EᵢᵥE₄ | | E₄* | Eₐ |
| 287 | E₁ₐE₅EᵢᵥE₄ | | E₄* | Eₐ |
| 288 | E_{1b}E₅EᵢᵥE₄ | | E₄* | Eₐ |
| 289 | E₁ₐ | AlkL | | Eₐ |
| 290 | E_{1b} | AlkL | | Eₐ |
| 291 | E₁ₐE₅ | AlkL | | Eₐ |
| 292 | E_{1b}E₅ | AlkL | | Eₐ |
| 293 | E₁ₐEᵢ | AlkL | | Eₐ |
| 294 | E_{1b}Eᵢ | AlkL | | Eₐ |
| 295 | E₁ₐEᵢᵢ | AlkL | | Eₐ |
| 296 | E_{1b}Eᵢᵢ | AlkL | | Eₐ |
| 297 | E₁ₐEᵢᵢE_{iib} | AlkL | | Eₐ |
| 298 | E_{1b}EᵢᵢE_{iib} | AlkL | | Eₐ |
| 299 | E₁ₐE₅Eᵢ | AlkL | | Eₐ |
| 300 | E_{1b}E₅Eᵢ | AlkL | | Eₐ |
| 301 | E₁ₐE₅Eᵢᵢ | AlkL | | Eₐ |
| 302 | E_{1b}E₅Eᵢᵢ | AlkL | | Eₐ |
| 303 | E₁ₐE₅EᵢᵢE_{iib} | AlkL | | Eₐ |
| 304 | E_{1b}E₅EᵢᵢE_{iib} | AlkL | | Eₐ |
| 305 | E₁ₐE₄ | AlkL | | Eₐ |
| 306 | E_{1b}E₄ | AlkL | | Eₐ |
| 307 | E₁ₐE₅E₄ | AlkL | | Eₐ |
| 308 | E_{1b}E₅E₄ | AlkL | | Eₐ |
| 309 | E₁ₐEᵢE₄ | AlkL | | Eₐ |
| 310 | E_{1b}EᵢE₄ | AlkL | | Eₐ |
| 311 | E₁ₐEᵢᵢE₄ | AlkL | | Eₐ |
| 312 | E_{1b}EᵢᵢE₄ | AlkL | | Eₐ |
| 313 | E₁ₐEᵢᵢE_{iib}E₄ | AlkL | | Eₐ |
| 314 | E_{1b}EᵢᵢE_{iib}E₄ | AlkL | | Eₐ |
| 315 | E₁ₐE₅EᵢE₄ | AlkL | | Eₐ |
| 316 | E_{1b}E₅EᵢE₄ | AlkL | | Eₐ |
| 317 | E₁ₐE₅EᵢᵢE₄ | AlkL | | Eₐ |
| 318 | E_{1b}E₅EᵢᵢE₄ | AlkL | | Eₐ |
| 319 | E₁ₐE₅EᵢᵢE_{iib}E₄ | AlkL | | Eₐ |
| 320 | E_{1b}E₅EᵢᵢE_{iib}E₄ | AlkL | | Eₐ |
| 321 | E₁ₐEᵢᵢᵢ | AlkL | | Eₐ |
| 322 | E_{1b}Eᵢᵢᵢ | AlkL | | Eₐ |
| 323 | E₁ₐE₅Eᵢᵢᵢ | AlkL | | Eₐ |
| 324 | E_{1b}E₅Eᵢᵢᵢ | AlkL | | Eₐ |
| 325 | E₁ₐEᵢᵢᵢE₄ | AlkL | | Eₐ |
| 326 | E_{1b}EᵢᵢᵢE₄ | AlkL | | Eₐ |
| 327 | E₁ₐE₅EᵢᵢᵢE₄ | AlkL | | Eₐ |
| 328 | E_{1b}E₅EᵢᵢᵢE₄ | AlkL | | Eₐ |
| 329 | E₁ₐEᵢᵥ | AlkL | | Eₐ |
| 330 | E_{1b}Eᵢᵥ | AlkL | | Eₐ |
| 331 | E₁ₐE₅Eᵢᵥ | AlkL | | Eₐ |
| 332 | E_{1b}E₅Eᵢᵥ | AlkL | | Eₐ |
| 333 | E₁ₐEᵢᵥE₄ | AlkL | | Eₐ |
| 334 | E_{1b}EᵢᵥE₄ | AlkL | | Eₐ |
| 335 | E₁ₐE₅EᵢᵥE₄ | AlkL | | Eₐ |
| 336 | E_{1b}E₅EᵢᵥE₄ | AlkL | | Eₐ |
| 337 | E₁ₐ | AlkL | E₄* | Eₐ |
| 338 | E_{1b} | AlkL | E₄* | Eₐ |
| 339 | E₁ₐE₅ | AlkL | E₄* | Eₐ |
| 340 | E_{1b}E₅ | AlkL | E₄* | Eₐ |
| 341 | E₁ₐEᵢ | AlkL | E₄* | Eₐ |
| 342 | E_{1b}Eᵢ | AlkL | E₄* | Eₐ |
| 343 | E₁ₐEᵢᵢ | AlkL | E₄* | Eₐ |
| 344 | E_{1b}Eᵢᵢ | AlkL | E₄* | Eₐ |
| 345 | E₁ₐEᵢᵢE_{iib} | AlkL | E₄* | Eₐ |
| 346 | E_{1b}EᵢᵢE_{iib} | AlkL | E₄* | Eₐ |
| 347 | E₁ₐE₅Eᵢ | AlkL | E₄* | Eₐ |
| 348 | E_{1b}E₅Eᵢ | AlkL | E₄* | Eₐ |
| 349 | E₁ₐE₅Eᵢᵢ | AlkL | E₄* | Eₐ |
| 350 | E_{1b}E₅Eᵢᵢ | AlkL | E₄* | Eₐ |
| 351 | E₁ₐE₅EᵢᵢE_{iib} | AlkL | E₄* | Eₐ |
| 352 | E_{1b}E₅EᵢᵢE_{iib} | AlkL | E₄* | Eₐ |
| 353 | E₁ₐE₄ | AlkL | E₄* | Eₐ |
| 354 | E_{1b}E₄ | AlkL | E₄* | Eₐ |
| 355 | E₁ₐE₅E₄ | AlkL | E₄* | Eₐ |
| 356 | E_{1b}E₅E₄ | AlkL | E₄* | Eₐ |
| 357 | E₁ₐEᵢE₄ | AlkL | E₄* | Eₐ |
| 358 | E_{1b}EᵢE₄ | AlkL | E₄* | Eₐ |
| 359 | E₁ₐEᵢᵢE₄ | AlkL | E₄* | Eₐ |
| 360 | E_{1b}EᵢᵢE₄ | AlkL | E₄* | Eₐ |
| 361 | E₁ₐEᵢᵢE_{iib}E₄ | AlkL | E₄* | Eₐ |
| 362 | E_{1b}EᵢᵢE_{iib}E₄ | AlkL | E₄* | Eₐ |
| 363 | E₁ₐE₅EᵢE₄ | AlkL | E₄* | Eₐ |
| 364 | E_{1b}E₅EᵢE₄ | AlkL | E₄* | Eₐ |
| 365 | E₁ₐE₅EᵢᵢE₄ | AlkL | E₄* | Eₐ |
| 366 | E_{1b}E₅EᵢᵢE₄ | AlkL | E₄* | Eₐ |
| 367 | E₁ₐE₅EᵢᵢE_{iib}E₄ | AlkL | E₄* | Eₐ |
| 368 | E_{1b}E₅EᵢᵢE_{iib}E₄ | AlkL | E₄* | Eₐ |
| 369 | E₁ₐEᵢᵢᵢ | AlkL | E₄* | Eₐ |
| 370 | E_{1b}Eᵢᵢᵢ | AlkL | E₄* | Eₐ |
| 371 | E₁ₐE₅Eᵢᵢᵢ | AlkL | E₄* | Eₐ |
| 372 | E_{1b}E₅Eᵢᵢᵢ | AlkL | E₄* | Eₐ |
| 373 | E₁ₐEᵢᵢᵢE₄ | AlkL | E₄* | Eₐ |
| 374 | E_{1b}EᵢᵢᵢE₄ | AlkL | E₄* | Eₐ |
| 375 | E₁ₐE₅EᵢᵢᵢE₄ | AlkL | E₄* | Eₐ |
| 376 | E_{1b}E₅EᵢᵢᵢE₄ | AlkL | E₄* | Eₐ |
| 377 | E₁ₐEᵢᵥ | AlkL | E₄* | Eₐ |
| 378 | E_{1b}Eᵢᵥ | AlkL | E₄* | Eₐ |
| 379 | E₁ₐE₅Eᵢᵥ | AlkL | E₄* | Eₐ |
| 380 | E_{1b}E₅Eᵢᵥ | AlkL | E₄* | Eₐ |
| 381 | E₁ₐEᵢᵥE₄ | AlkL | E₄* | Eₐ |
| 382 | E_{1b}EᵢᵥE₄ | AlkL | E₄* | Eₐ |
| 383 | E₁ₐE₅EᵢᵥE₄ | AlkL | E₄* | Eₐ |
| 384 | E_{1b}E₅EᵢᵥE₄ | AlkL | E₄* | Eₐ |
| 385 | E₁ₐ | | | E_{b} |
| 386 | E_{1b} | | | E_{b} |
| 387 | E₁ₐE₅ | | | E_{b} |
| 388 | E_{1b}E₅ | | | E_{b} |
| 389 | E₁ₐEᵢ | | | E_{b} |
| 390 | E_{1b}Eᵢ | | | E_{b} |
| 391 | E₁ₐEᵢᵢ | | | E_{b} |
| 392 | E_{1b}Eᵢᵢ | | | E_{b} |
| 393 | E₁ₐEᵢᵢE_{iib} | | | E_{b} |
| 394 | E_{1b}EᵢᵢE_{iib} | | | E_{b} |
| 395 | E₁ₐE₅Eᵢ | | | E_{b} |
| 396 | E_{1b}E₅Eᵢ | | | E_{b} |
| 397 | E₁ₐE₅Eᵢᵢ | | | E_{b} |
| 398 | E_{1b}E₅Eᵢᵢ | | | E_{b} |
| 399 | E₁ₐE₅EᵢᵢE_{iib} | | | E_{b} |
| 400 | E_{1b}E₅EᵢᵢE_{iib} | | | E_{b} |
| 401 | E₁ₐE₄ | | | E_{b} |
| 402 | E_{1b}E₄ | | | E_{b} |
| 403 | E₁ₐE₅E₄ | | | E_{b} |
| 404 | E_{1b}E₅E₄ | | | E_{b} |
| 405 | E₁ₐEᵢE₄ | | | E_{b} |
| 406 | E_{1b}EᵢE₄ | | | E_{b} |
| 407 | E₁ₐEᵢᵢE₄ | | | E_{b} |
| 408 | E_{1b}EᵢᵢE₄ | | | E_{b} |
| 409 | E₁ₐEᵢᵢE_{iib}E₄ | | | E_{b} |
| 410 | E_{1b}EᵢᵢE_{iib}E₄ | | | E_{b} |
| 411 | E₁ₐE₅EᵢE₄ | | | E_{b} |
| 412 | E_{1b}E₅EᵢE₄ | | | E_{b} |
| 413 | E₁ₐE₅EᵢᵢE₄ | | | E_{b} |
| 414 | E_{1b}E₅EᵢᵢE₄ | | | E_{b} |
| 415 | E₁ₐE₅EᵢᵢE_{iib}E₄ | | | E_{b} |
| 416 | E_{1b}E₅EᵢᵢE_{iib}E₄ | | | E_{b} |
| 417 | E₁ₐEᵢᵢᵢ | | | E_{b} |
| 418 | E_{1b}Eᵢᵢᵢ | | | E_{b} |
| 419 | E₁ₐE₅Eᵢᵢᵢ | | | E_{b} |
| 420 | E_{1b}E₅Eᵢᵢᵢ | | | E_{b} |
| 421 | E₁ₐEᵢᵢᵢE₄ | | | E_{b} |
| 422 | E_{1b}EᵢᵢᵢE₄ | | | E_{b} |
| 423 | E₁ₐE₅EᵢᵢᵢE₄ | | | E_{b} |
| 424 | E_{1b}E₅EᵢᵢᵢE₄ | | | E_{b} |
| 425 | E₁ₐEᵢᵥ | | | E_{b} |
| 426 | E_{1b}Eᵢᵥ | | | E_{b} |
| 427 | E₁ₐE₅Eᵢᵥ | | | E_{b} |
| 428 | E_{1b}E₅Eᵢᵥ | | | E_{b} |
| 429 | E₁ₐEᵢᵥE₄ | | | E_{b} |
| 430 | E_{1b}EᵢᵥE₄ | | | E_{b} |
| 431 | E₁ₐE₅EᵢᵥE₄ | | | E_{b} |
| 432 | E_{1b}E₅EᵢᵥE₄ | | | E_{b} |
| 433 | E₁ₐ | | E₄* | E_{b} |
| 434 | E_{1b} | | E₄* | E_{b} |
| 435 | E₁ₐE₅ | | E₄* | E_{b} |
| 436 | E_{1b}E₅ | | E₄* | E_{b} |
| 437 | E₁ₐEᵢ | | E₄* | E_{b} |
| 438 | E_{1b}Eᵢ | | E₄* | E_{b} |
| 439 | E₁ₐEᵢᵢ | | E₄* | E_{b} |
| 440 | E_{1b}Eᵢᵢ | | E₄* | E_{b} |
| 441 | E₁ₐEᵢᵢE_{iib} | | E₄* | E_{b} |
| 442 | E_{1b}EᵢᵢE_{iib} | | E₄* | E_{b} |
| 443 | E₁ₐE₅Eᵢ | | E₄* | E_{b} |
| 444 | E_{1b}E₅Eᵢ | | E₄* | E_{b} |
| 445 | E₁ₐE₅Eᵢᵢ | | E₄* | E_{b} |
| 446 | E_{1b}E₅Eᵢᵢ | | E₄* | E_{b} |
| 447 | E₁ₐE₅EᵢᵢE_{iib} | | E₄* | E_{b} |
| 448 | E_{1b}E₅EᵢᵢE_{iib} | | E₄* | E_{b} |
| 449 | E₁ₐE₄ | | E₄* | E_{b} |
| 450 | E_{1b}E₄ | | E₄* | E_{b} |
| 451 | E₁ₐE₅E₄ | | E₄* | E_{b} |
| 452 | E_{1b}E₅E₄ | | E₄* | E_{b} |
| 453 | E₁ₐEᵢE₄ | | E₄* | E_{b} |
| 454 | E_{1b}EᵢE₄ | | E₄* | E_{b} |
| 455 | E₁ₐEᵢᵢE₄ | | E₄* | E_{b} |
| 456 | E_{1b}EᵢᵢE₄ | | E₄* | E_{b} |
| 457 | E₁ₐEᵢᵢE_{iib}E₄ | | E₄* | E_{b} |
| 458 | E_{1b}EᵢᵢE_{iib}E₄ | | E₄* | E_{b} |
| 459 | E₁ₐE₅EᵢE₄ | | E₄* | E_{b} |
| 460 | E_{1b}E₅EᵢE₄ | | E₄* | E_{b} |
| 461 | E₁ₐE₅EᵢᵢE₄ | | E₄* | E_{b} |
| 462 | E_{1b}E₅EᵢᵢE₄ | | E₄* | E_{b} |
| 463 | E₁ₐE₅EᵢᵢE_{iib}E₄ | | E₄* | E_{b} |
| 464 | E_{1b}E₅EᵢᵢE_{iib}E₄ | | E₄* | E_{b} |
| 465 | E₁ₐEᵢᵢᵢ | | E₄* | E_{b} |
| 466 | E_{1b}Eᵢᵢᵢ | | E₄* | E_{b} |
| 467 | E₁ₐE₅Eᵢᵢᵢ | | E₄* | E_{b} |
| 468 | E_{1b}E₅Eᵢᵢᵢ | | E₄* | E_{b} |
| 469 | E₁ₐEᵢᵢᵢE₄ | | E₄* | E_{b} |
| 470 | E_{1b}EᵢᵢᵢE₄ | | E₄* | E_{b} |
| 471 | E₁ₐE₅EᵢᵢᵢE₄ | | E₄* | E_{b} |
| 472 | E_{1b}E₅EᵢᵢᵢE₄ | | E₄* | E_{b} |
| 473 | E₁ₐEᵢᵥ | | E₄* | E_{b} |
| 474 | E_{1b}Eᵢᵥ | | E₄* | E_{b} |
| 475 | E₁ₐE₅Eᵢᵥ | | E₄* | E_{b} |
| 476 | E_{1b}E₅Eᵢᵥ | | E₄* | E_{b} |
| 477 | E₁ₐEᵢᵥE₄ | | E₄* | E_{b} |
| 478 | E_{1b}EᵢᵥE₄ | | E₄* | E_{b} |
| 479 | E₁ₐE₅EᵢᵥE₄ | | E₄* | E_{b} |
| 480 | E_{1b}E₅EᵢᵥE₄ | | E₄* | E_{b} |
| 481 | E₁ₐ | AlkL | | E_{b} |
| 482 | E_{1b} | AlkL | | E_{b} |
| 483 | E₁ₐE₅ | AlkL | | E_{b} |
| 484 | E_{1b}E₅ | AlkL | | E_{b} |
| 485 | E₁ₐEᵢ | AlkL | | E_{b} |
| 486 | E_{1b}Eᵢ | AlkL | | E_{b} |
| 487 | E₁ₐEᵢᵢ | AlkL | | E_{b} |
| 488 | E_{1b}Eᵢᵢ | AlkL | | E_{b} |
| 489 | E₁ₐEᵢᵢE_{iib} | AlkL | | E_{b} |
| 490 | E_{1b}EᵢᵢE_{iib} | AlkL | | E_{b} |
| 491 | E₁ₐE₅Eᵢ | AlkL | | E_{b} |
| 492 | E_{1b}E₅Eᵢ | AlkL | | E_{b} |
| 493 | E₁ₐE₅Eᵢᵢ | AlkL | | E_{b} |
| 494 | E_{1b}E₅Eᵢᵢ | AlkL | | E_{b} |
| 495 | E₁ₐE₅EᵢᵢE_{iib} | AlkL | | E_{b} |
| 496 | E_{1b}E₅EᵢᵢE_{iib} | AlkL | | E_{b} |
| 497 | E₁ₐE₄ | AlkL | | E_{b} |
| 498 | E_{1b}E₄ | AlkL | | E_{b} |
| 499 | E₁ₐE₅E₄ | AlkL | | E_{b} |
| 500 | E_{1b}E₅E₄ | AlkL | | E_{b} |
| 501 | E₁ₐEᵢE₄ | AlkL | | E_{b} |
| 502 | E_{1b}EᵢE₄ | AlkL | | E_{b} |
| 503 | E₁ₐEᵢᵢE₄ | AlkL | | E_{b} |
| 504 | E_{1b}EᵢᵢE₄ | AlkL | | E_{b} |
| 505 | E₁ₐEᵢᵢE_{iib}E₄ | AlkL | | E_{b} |
| 506 | E_{1b}EᵢᵢE_{iib}E₄ | AlkL | | E_{b} |
| 507 | E₁ₐE₅EᵢE₄ | AlkL | | E_{b} |
| 508 | E_{1b}E₅EᵢE₄ | AlkL | | E_{b} |
| 509 | E₁ₐE₅EᵢᵢE₄ | AlkL | | E_{b} |
| 510 | E_{1b}E₅EᵢᵢE₄ | AlkL | | E_{b} |
| 511 | E₁ₐE₅EᵢᵢE_{iib}E₄ | AlkL | | E_{b} |
| 512 | E_{1b}E₅EᵢᵢE_{iib}E₄ | AlkL | | E_{b} |
| 513 | E₁ₐEᵢᵢᵢ | AlkL | | E_{b} |
| 514 | E_{1b}Eᵢᵢᵢ | AlkL | | E_{b} |
| 515 | E₁ₐE₅Eᵢᵢᵢ | AlkL | | E_{b} |
| 516 | E_{1b}E₅Eᵢᵢᵢ | AlkL | | E_{b} |
| 517 | E₁ₐEᵢᵢᵢE₄ | AlkL | | E_{b} |
| 518 | E_{1b}EᵢᵢᵢE₄ | AlkL | | E_{b} |
| 519 | E₁ₐE₅EᵢᵢᵢE₄ | AlkL | | E_{b} |
| 520 | E_{1b}E₅EᵢᵢᵢE₄ | AlkL | | E_{b} |
| 521 | E₁ₐEᵢᵥ | AlkL | | E_{b} |
| 522 | E_{1b}Eᵢᵥ | AlkL | | E_{b} |
| 523 | E₁ₐE₅Eᵢᵥ | AlkL | | E_{b} |
| 524 | E_{1b}E₅Eᵢᵥ | AlkL | | E_{b} |
| 525 | E₁ₐEᵢᵥE₄ | AlkL | | E_{b} |
| 526 | E_{1b}EᵢᵥE₄ | AlkL | | E_{b} |
| 527 | E₁ₐE₅EᵢᵥE₄ | AlkL | | E_{b} |
| 528 | E_{1b}E₅EᵢᵥE₄ | AlkL | | E_{b} |
| 529 | E₁ₐ | AlkL | E₄* | E_{b} |
| 530 | E_{1b} | AlkL | E₄* | E_{b} |
| 531 | E₁ₐE₅ | AlkL | E₄* | E_{b} |
| 532 | E_{1b}E₅ | AlkL | E₄* | E_{b} |
| 533 | E₁ₐEᵢ | AlkL | E₄* | E_{b} |
| 534 | E_{1b}Eᵢ | AlkL | E₄* | E_{b} |
| 535 | E₁ₐEᵢᵢ | AlkL | E₄* | E_{b} |
| 536 | E_{1b}Eᵢᵢ | AlkL | E₄* | E_{b} |
| 537 | E₁ₐEᵢᵢE_{iib} | AlkL | E₄* | E_{b} |
| 538 | E_{1b}EᵢᵢE_{iib} | AlkL | E₄* | E_{b} |
| 539 | E₁ₐE₅Eᵢ | AlkL | E₄* | E_{b} |
| 540 | E_{1b}E₅Eᵢ | AlkL | E₄* | E_{b} |
| 541 | E₁ₐE₅Eᵢᵢ | AlkL | E₄* | E_{b} |
| 542 | E_{1b}E₅Eᵢᵢ | AlkL | E₄* | E_{b} |
| 543 | E₁ₐE₅EᵢᵢE_{iib} | AlkL | E₄* | E_{b} |
| 544 | E_{1b}E₅EᵢᵢE_{iib} | AlkL | E₄* | E_{b} |
| 545 | E₁ₐE₄ | AlkL | E₄* | E_{b} |
| 546 | E_{1b}E₄ | AlkL | E₄* | E_{b} |
| 547 | E₁ₐE₅E₄ | AlkL | E₄* | E_{b} |
| 548 | E_{1b}E₅E₄ | AlkL | E₄* | E_{b} |
| 549 | E₁ₐEᵢE₄ | AlkL | E₄* | E_{b} |
| 550 | E_{1b}EᵢE₄ | AlkL | E₄* | E_{b} |
| 551 | E₁ₐEᵢᵢE₄ | AlkL | E₄* | E_{b} |
| 552 | E_{1b}EᵢᵢE₄ | AlkL | E₄* | E_{b} |
| 553 | E₁ₐEᵢᵢE_{iib}E₄ | AlkL | E₄* | E_{b} |
| 554 | E_{1b}EᵢᵢE_{iib}E₄ | AlkL | E₄* | E_{b} |
| 555 | E₁ₐE₅EᵢE₄ | AlkL | E₄* | E_{b} |
| 556 | E_{1b}E₅EᵢE₄ | AlkL | E₄* | E_{b} |
| 557 | E₁ₐE₅EᵢᵢE₄ | AlkL | E₄* | E_{b} |
| 558 | E_{1b}E₅EᵢᵢE₄ | AlkL | E₄* | E_{b} |
| 559 | E₁ₐE₅EᵢᵢE_{iib}E₄ | AlkL | E₄* | E_{b} |
| 560 | E_{1b}E₅EᵢᵢE_{iib}E₄ | AlkL | E₄* | E_{b} |
| 561 | E₁ₐEᵢᵢᵢ | AlkL | E₄* | E_{b} |
| 562 | E_{1b}Eᵢᵢᵢ | AlkL | E₄* | E_{b} |
| 563 | E₁ₐE₅Eᵢᵢᵢ | AlkL | E₄* | E_{b} |
| 564 | E_{1b}E₅Eᵢᵢᵢ | AlkL | E₄* | E_{b} |
| 565 | E₁ₐEᵢᵢᵢE₄ | AlkL | E₄* | E_{b} |
| 566 | E_{1b}EᵢᵢᵢE₄ | AlkL | E₄* | E_{b} |
| 567 | E₁ₐE₅EᵢᵢᵢE₄ | AlkL | E₄* | E_{b} |
| 568 | E_{1b}E₅EᵢᵢᵢE₄ | AlkL | E₄* | E_{b} |
| 569 | E₁ₐEᵢᵥ | AlkL | E₄* | E_{b} |
| 570 | E_{1b}Eᵢᵥ | AlkL | E₄* | E_{b} |
| 571 | E₁ₐE₅Eᵢᵥ | AlkL | E₄* | E_{b} |
| 572 | E_{1b}E₅Eᵢᵥ | AlkL | E₄* | E_{b} |
| 573 | E₁ₐEᵢᵥE₄ | AlkL | E₄* | E_{b} |
| 574 | E_{1b}EᵢᵥE₄ | AlkL | E₄* | E_{b} |
| 575 | E₁ₐE₅EᵢᵥE₄ | AlkL | E₄* | E_{b} |
| 576 | E_{1b}E₅EᵢᵥE₄ | AlkL | E₄* | E_{b} |
| 577 | E₁ₐ | | | E_{d} |
| 578 | E_{1b} | | | E_{d} |
| 579 | E₁ₐE₅ | | | E_{d} |
| 580 | E_{1b}E₅ | | | E_{d} |
| 581 | E₁ₐEᵢ | | | E_{d} |
| 582 | E_{1b}Eᵢ | | | E_{d} |
| 583 | E₁ₐEᵢᵢ | | | E_{d} |
| 584 | E_{1b}Eᵢᵢ | | | E_{d} |
| 585 | E₁ₐEᵢᵢE_{iib} | | | E_{d} |
| 586 | E_{1b}EᵢᵢE_{iib} | | | E_{d} |
| 587 | E₁ₐE₅Eᵢ | | | E_{d} |
| 588 | E_{1b}E₅Eᵢ | | | E_{d} |
| 589 | E₁ₐE₅Eᵢᵢ | | | E_{d} |
| 590 | E_{1b}E₅Eᵢᵢ | | | E_{d} |
| 591 | E₁ₐE₅EᵢᵢE_{iib} | | | E_{d} |
| 592 | E_{1b}E₅EᵢᵢE_{iib} | | | E_{d} |
| 593 | E₁ₐE₄ | | | E_{d} |
| 594 | E_{1b}E₄ | | | E_{d} |
| 595 | E₁ₐE₅E₄ | | | E_{d} |
| 596 | E_{1b}E₅E₄ | | | E_{d} |
| 597 | E₁ₐEᵢE₄ | | | E_{d} |
| 598 | E_{1b}EᵢE₄ | | | E_{d} |
| 599 | E₁ₐEᵢᵢE₄ | | | E_{d} |
| 600 | E_{1b}EᵢᵢE₄ | | | E_{d} |
| 601 | E₁ₐEᵢᵢE_{iib}E₄ | | | E_{d} |
| 602 | E_{1b}EᵢᵢE_{iib}E₄ | | | E_{d} |
| 603 | E₁ₐE₅EᵢE₄ | | | E_{d} |
| 604 | E_{1b}E₅EᵢE₄ | | | E_{d} |
| 605 | E₁ₐE₅EᵢᵢE₄ | | | E_{d} |
| 606 | E_{1b}E₅EᵢᵢE₄ | | | E_{d} |
| 607 | E₁ₐE₅EᵢᵢE_{iib}E₄ | | | E_{d} |
| 608 | E_{1b}E₅EᵢᵢE_{iib}E₄ | | | E_{d} |
| 609 | E₁ₐEᵢᵢᵢ | | | E_{d} |
| 610 | E_{1b}Eᵢᵢᵢ | | | E_{d} |
| 611 | E₁ₐE₅Eᵢᵢᵢ | | | E_{d} |
| 612 | E_{1b}E₅Eᵢᵢᵢ | | | E_{d} |
| 613 | E₁ₐEᵢᵢᵢE₄ | | | E_{d} |
| 614 | E_{1b}EᵢᵢᵢE₄ | | | E_{d} |
| 615 | E₁ₐE₅EᵢᵢᵢE₄ | | | E_{d} |
| 616 | E_{1b}E₅EᵢᵢᵢE₄ | | | E_{d} |
| 617 | E₁ₐEᵢᵥ | | | E_{d} |
| 618 | E_{1b}Eᵢᵥ | | | E_{d} |
| 619 | E₁ₐE₅Eᵢᵥ | | | E_{d} |
| 620 | E_{1b}E₅Eᵢᵥ | | | E_{d} |
| 621 | E₁ₐEᵢᵥE₄ | | | E_{d} |
| 622 | E_{1b}EᵢᵥE₄ | | | E_{d} |
| 623 | E₁ₐE₅EᵢᵥE₄ | | | E_{d} |
| 624 | E_{1b}E₅EᵢᵥE₄ | | | E_{d} |
| 625 | E₁ₐ | | E₄* | E_{d} |
| 626 | E_{1b} | | E₄* | E_{d} |
| 627 | E₁ₐE₅ | | E₄* | E_{d} |
| 628 | E_{1b}E₅ | | E₄* | E_{d} |
| 629 | E₁ₐEᵢ | | E₄* | E_{d} |
| 630 | E_{1b}Eᵢ | | E₄* | E_{d} |
| 631 | E₁ₐEᵢᵢ | | E₄* | E_{d} |
| 632 | E_{1b}Eᵢᵢ | | E₄* | E_{d} |
| 633 | E₁ₐEᵢᵢE_{iib} | | E₄* | E_{d} |
| 634 | E_{1b}EᵢᵢE_{iib} | | E₄* | E_{d} |
| 635 | E₁ₐE₅Eᵢ | | E₄* | E_{d} |
| 636 | E_{1b}E₅Eᵢ | | E₄* | E_{d} |
| 637 | E₁ₐE₅Eᵢᵢ | | E₄* | E_{d} |
| 638 | E_{1b}E₅Eᵢᵢ | | E₄* | E_{d} |
| 639 | E₁ₐE₅EᵢᵢE_{iib} | | E₄* | E_{d} |
| 640 | E_{1b}E₅EᵢᵢE_{iib} | | E₄* | E_{d} |
| 641 | E₁ₐE₄ | | E₄* | E_{d} |
| 642 | E_{1b}E₄ | | E₄* | E_{d} |
| 643 | E₁ₐE₅E₄ | | E₄* | E_{d} |
| 644 | E_{1b}E₅E₄ | | E₄* | E_{d} |
| 645 | E₁ₐEᵢE₄ | | E₄* | E_{d} |
| 646 | E_{1b}EᵢE₄ | | E₄* | E_{d} |
| 647 | E₁ₐEᵢᵢE₄ | | E₄* | E_{d} |
| 648 | E_{1b}EᵢᵢE₄ | | E₄* | E_{d} |
| 649 | E₁ₐEᵢᵢE_{iib}E₄ | | E₄* | E_{d} |
| 650 | E_{1b}EᵢᵢE_{iib}E₄ | | E₄* | E_{d} |
| 651 | E₁ₐE₅EᵢE₄ | | E₄* | E_{d} |
| 652 | E_{1b}E₅EᵢE₄ | | E₄* | E_{d} |
| 653 | E₁ₐE₅EᵢᵢE₄ | | E₄* | E_{d} |
| 654 | E_{1b}E₅EᵢᵢE₄ | | E₄* | E_{d} |
| 655 | E₁ₐE₅EᵢᵢE_{iib}E₄ | | E₄* | E_{d} |
| 656 | E_{1b}E₅EᵢᵢE_{iib}E₄ | | E₄* | E_{d} |
| 657 | E₁ₐEᵢᵢᵢ | | E₄* | E_{d} |
| 658 | E_{1b}Eᵢᵢᵢ | | E₄* | E_{d} |
| 659 | E₁ₐE₅Eᵢᵢᵢ | | E₄* | E_{d} |
| 660 | E_{1b}E₅Eᵢᵢᵢ | | E₄* | E_{d} |
| 661 | E₁ₐEᵢᵢᵢE₄ | | E₄* | E_{d} |
| 662 | E_{1b}EᵢᵢᵢE₄ | | E₄* | E_{d} |
| 663 | E₁ₐE₅EᵢᵢᵢE₄ | | E₄* | E_{d} |
| 664 | E_{1b}E₅EᵢᵢᵢE₄ | | E₄* | E_{d} |
| 665 | E₁ₐEᵢᵥ | | E₄* | E_{d} |
| 666 | E_{1b}Eᵢᵥ | | E₄* | E_{d} |
| 667 | E₁ₐE₅Eᵢᵥ | | E₄* | E_{d} |
| 668 | E_{1b}E₅Eᵢᵥ | | E₄* | E_{d} |
| 669 | E₁ₐEᵢᵥE₄ | | E₄* | E_{d} |
| 670 | E_{1b}EᵢᵥE₄ | | E₄* | E_{d} |
| 671 | E₁ₐE₅EᵢᵥE₄ | | E₄* | E_{d} |
| 672 | E_{1b}E₅EᵢᵥE₄ | | E₄* | E_{d} |
| 673 | E₁ₐ | AlkL | | E_{d} |
| 674 | E_{1b} | AlkL | | E_{d} |
| 675 | E₁ₐE₅ | AlkL | | E_{d} |
| 676 | E_{1b}E₅ | AlkL | | E_{d} |
| 677 | E₁ₐEᵢ | AlkL | | E_{d} |
| 678 | E_{1b}Eᵢ | AlkL | | E_{d} |
| 679 | E₁ₐEᵢᵢ | AlkL | | E_{d} |
| 680 | E_{1b}Eᵢᵢ | AlkL | | E_{d} |
| 681 | E₁ₐEᵢᵢE_{iib} | AlkL | | E_{d} |
| 682 | E_{1b}EᵢᵢE_{iib} | AlkL | | E_{d} |
| 683 | E₁ₐE₅Eᵢ | AlkL | | E_{d} |
| 684 | E_{1b}E₅Eᵢ | AlkL | | E_{d} |
| 685 | E₁ₐE₅Eᵢᵢ | AlkL | | E_{d} |
| 686 | E_{1b}E₅Eᵢᵢ | AlkL | | E_{d} |
| 687 | E₁ₐE₅EᵢᵢE_{iib} | AlkL | | E_{d} |
| 688 | E_{1b}E₅EᵢᵢE_{iib} | AlkL | | E_{d} |
| 689 | E₁ₐE₄ | AlkL | | E_{d} |
| 690 | E_{1b}E₄ | AlkL | | E_{d} |
| 691 | E₁ₐE₅E₄ | AlkL | | E_{d} |
| 692 | E_{1b}E₅E₄ | AlkL | | E_{d} |
| 693 | E₁ₐEᵢE₄ | AlkL | | E_{d} |
| 694 | E_{1b}EᵢE₄ | AlkL | | E_{d} |
| 695 | E₁ₐEᵢᵢE₄ | AlkL | | E_{d} |
| 696 | E_{1b}EᵢᵢE₄ | AlkL | | E_{d} |
| 697 | E₁ₐEᵢᵢE_{iib}E₄ | AlkL | | E_{d} |
| 698 | E_{1b}EᵢᵢE_{iib}E₄ | AlkL | | E_{d} |
| 699 | E₁ₐE₅EᵢE₄ | AlkL | | E_{d} |
| 700 | E_{1b}E₅EᵢE₄ | AlkL | | E_{d} |
| 701 | E₁ₐE₅EᵢᵢE₄ | AlkL | | E_{d} |
| 702 | E_{1b}E₅EᵢᵢE₄ | AlkL | | E_{d} |
| 703 | E₁ₐE₅EᵢᵢE_{iib}E₄ | AlkL | | E_{d} |
| 704 | E_{1b}E₅EᵢᵢE_{iib}E₄ | AlkL | | E_{d} |
| 705 | E₁ₐEᵢᵢᵢ | AlkL | | E_{d} |
| 706 | E_{1b}Eᵢᵢᵢ | AlkL | | E_{d} |
| 707 | E₁ₐE₅Eᵢᵢᵢ | AlkL | | E_{d} |
| 708 | E_{1b}E₅Eᵢᵢᵢ | AlkL | | E_{d} |
| 709 | E₁ₐEᵢᵢᵢE₄ | AlkL | | E_{d} |
| 710 | E_{1b}EᵢᵢᵢE₄ | AlkL | | E_{d} |
| 711 | E₁ₐE₅EᵢᵢᵢE₄ | AlkL | | E_{d} |
| 712 | E_{1b}E₅EᵢᵢᵢE₄ | AlkL | | E_{d} |
| 713 | E₁ₐEᵢᵥ | AlkL | | E_{d} |
| 714 | E_{1b}Eᵢᵥ | AlkL | | E_{d} |
| 715 | E₁ₐE₅Eᵢᵥ | AlkL | | E_{d} |
| 716 | E_{1b}E₅Eᵢᵥ | AlkL | | E_{d} |
| 717 | E₁ₐEᵢᵥE₄ | AlkL | | E_{d} |
| 718 | E_{1b}EᵢᵥE₄ | AlkL | | E_{d} |
| 719 | E₁ₐE₅EᵢᵥE₄ | AlkL | | E_{d} |
| 720 | E_{1b}E₅EᵢᵥE₄ | AlkL | | E_{d} |
| 721 | E₁ₐ | AlkL | E₄* | E_{d} |
| 722 | E_{1b} | AlkL | E₄* | E_{d} |
| 723 | E₁ₐE₅ | AlkL | E₄* | E_{d} |
| 724 | E_{1b}E₅ | AlkL | E₄* | E_{d} |
| 725 | E₁ₐEᵢ | AlkL | E₄* | E_{d} |
| 726 | E_{1b}Eᵢ | AlkL | E₄* | E_{d} |
| 727 | E₁ₐEᵢᵢ | AlkL | E₄* | E_{d} |
| 728 | E_{1b}Eᵢᵢ | AlkL | E₄* | E_{d} |
| 729 | E₁ₐEᵢᵢE_{iib} | AlkL | E₄* | E_{d} |
| 730 | E_{1b}EᵢᵢE_{iib} | AlkL | E₄* | E_{d} |
| 731 | E₁ₐE₅Eᵢ | AlkL | E₄* | E_{d} |
| 732 | E_{1b}E₅Eᵢ | AlkL | E₄* | E_{d} |
| 733 | E₁ₐE₅Eᵢᵢ | AlkL | E₄* | E_{d} |
| 734 | E_{1b}E₅Eᵢᵢ | AlkL | E₄* | E_{d} |
| 735 | E₁ₐE₅EᵢᵢE_{iib} | AlkL | E₄* | E_{d} |
| 736 | E_{1b}E₅EᵢᵢE_{iib} | AlkL | E₄* | E_{d} |
| 737 | E₁ₐE₄ | AlkL | E₄* | E_{d} |
| 738 | E_{1b}E₄ | AlkL | E₄* | E_{d} |
| 739 | E₁ₐE₅E₄ | AlkL | E₄* | E_{d} |
| 740 | E_{1b}E₅E₄ | AlkL | E₄* | E_{d} |
| 741 | E₁ₐEᵢE₄ | AlkL | E₄* | E_{d} |
| 742 | E_{1b}EᵢE₄ | AlkL | E₄* | E_{d} |
| 743 | E₁ₐEᵢᵢE₄ | AlkL | E₄* | E_{d} |
| 744 | E_{1b}EᵢᵢE₄ | AlkL | E₄* | E_{d} |
| 745 | E₁ₐEᵢᵢE_{iib}E₄ | AlkL | E₄* | E_{d} |
| 746 | E_{1b}EᵢᵢE_{iib}E₄ | AlkL | E₄* | E_{d} |
| 747 | E₁ₐE₅EᵢE₄ | AlkL | E₄* | E_{d} |
| 748 | E_{1b}E₅EᵢE₄ | AlkL | E₄* | E_{d} |
| 749 | E₁ₐE₅EᵢᵢE₄ | AlkL | E₄* | E_{d} |
| 750 | E_{1b}E₅EᵢᵢE₄ | AlkL | E₄* | E_{d} |
| 751 | E₁ₐE₅EᵢᵢE_{iib}E₄ | AlkL | E₄* | E_{d} |
| 752 | E_{1b}E₅EᵢᵢE_{iib}E₄ | AlkL | E₄* | E_{d} |
| 753 | E₁ₐEᵢᵢᵢ | AlkL | E₄* | E_{d} |
| 754 | E_{1b}Eᵢᵢᵢ | AlkL | E₄* | E_{d} |
| 755 | E₁ₐE₅Eᵢᵢᵢ | AlkL | E₄* | E_{d} |
| 756 | E_{1b}E₅Eᵢᵢᵢ | AlkL | E₄* | E_{d} |
| 757 | E₁ₐEᵢᵢᵢE₄ | AlkL | E₄* | E_{d} |
| 758 | E_{1b}EᵢᵢᵢE₄ | AlkL | E₄* | E_{d} |
| 759 | E₁ₐE₅EᵢᵢᵢE₄ | AlkL | E₄* | E_{d} |
| 760 | E_{1b}E₅EᵢᵢᵢE₄ | AlkL | E₄* | E_{d} |
| 761 | E₁ₐEᵢᵥ | AlkL | E₄* | E_{d} |
| 762 | E_{1b}Eᵢᵥ | AlkL | E₄* | E_{d} |
| 763 | E₁ₐE₅Eᵢᵥ | AlkL | E₄* | E_{d} |
| 764 | E_{1b}E₅Eᵢᵥ | AlkL | E₄* | E_{d} |
| 765 | E₁ₐEᵢᵥE₄ | AlkL | E₄* | E_{d} |
| 766 | E_{1b}EᵢᵥE₄ | AlkL | E₄* | E_{d} |
| 767 | E₁ₐE₅EᵢᵥE₄ | AlkL | E₄* | E_{d} |
| 768 | E_{1b}E₅EᵢᵥE₄ | AlkL | E₄* | E_{d} |
| 769 | E₁ₐ | | | Eₑ |
| 770 | E_{1b} | | | Eₑ |
| 771 | E₁ₐE₅ | | | Eₑ |
| 772 | E_{1b}E₅ | | | Eₑ |
| 773 | E₁ₐEᵢ | | | Eₑ |
| 774 | E_{1b}Eᵢ | | | Eₑ |
| 775 | E₁ₐEᵢᵢ | | | Eₑ |
| 776 | E_{1b}Eᵢᵢ | | | Eₑ |
| 777 | E₁ₐEᵢᵢE_{iib} | | | Eₑ |
| 778 | E_{1b}EᵢᵢE_{iib} | | | Eₑ |
| 779 | E₁ₐE₅Eᵢ | | | Eₑ |
| 780 | E_{1b}E₅Eᵢ | | | Eₑ |
| 781 | E₁ₐE₅Eᵢᵢ | | | Eₑ |
| 782 | E_{1b}E₅Eᵢᵢ | | | Eₑ |
| 783 | E₁ₐE₅EᵢᵢE_{iib} | | | Eₑ |
| 784 | E_{1b}E₅EᵢᵢE_{iib} | | | Eₑ |
| 785 | E₁ₐE₄ | | | Eₑ |
| 786 | E_{1b}E₄ | | | Eₑ |
| 787 | E₁ₐE₅E₄ | | | Eₑ |
| 788 | E_{1b}E₅E₄ | | | Eₑ |
| 789 | E₁ₐEᵢE₄ | | | Eₑ |
| 790 | E_{1b}EᵢE₄ | | | Eₑ |
| 791 | E₁ₐEᵢᵢE₄ | | | Eₑ |
| 792 | E_{1b}EᵢᵢE₄ | | | Eₑ |
| 793 | E₁ₐEᵢᵢE_{iib}E₄ | | | Eₑ |
| 794 | E_{1b}EᵢᵢE_{iib}E₄ | | | Eₑ |
| 795 | E₁ₐE₅EᵢE₄ | | | Eₑ |
| 796 | E_{1b}E₅EᵢE₄ | | | Eₑ |
| 797 | E₁ₐE₅EᵢᵢE₄ | | | Eₑ |
| 798 | E_{1b}E₅EᵢᵢE₄ | | | Eₑ |
| 799 | E₁ₐE₅EᵢᵢE_{iib}E₄ | | | Eₑ |
| 800 | E_{1b}E₅EᵢᵢE_{iib}E₄ | | | Eₑ |
| 801 | E₁ₐEᵢᵢᵢ | | | Eₑ |
| 802 | E_{1b}Eᵢᵢᵢ | | | Eₑ |
| 803 | E₁ₐE₅Eᵢᵢᵢ | | | Eₑ |
| 804 | E_{1b}E₅Eᵢᵢᵢ | | | Eₑ |
| 805 | E₁ₐEᵢᵢᵢE₄ | | | Eₑ |
| 806 | E_{1b}EᵢᵢᵢE₄ | | | Eₑ |
| 807 | E₁ₐE₅EᵢᵢᵢE₄ | | | Eₑ |
| 808 | E_{1b}E₅EᵢᵢᵢE₄ | | | Eₑ |
| 809 | E₁ₐEᵢᵥ | | | Eₑ |
| 810 | E_{1b}Eᵢᵥ | | | Eₑ |
| 811 | E₁ₐE₅Eᵢᵥ | | | Eₑ |
| 812 | E_{1b}E₅Eᵢᵥ | | | Eₑ |
| 813 | E₁ₐEᵢᵥE₄ | | | Eₑ |
| 814 | E_{1b}EᵢᵥE₄ | | | Eₑ |
| 815 | E₁ₐE₅EᵢᵥE₄ | | | Eₑ |
| 816 | E_{1b}E₅EᵢᵥE₄ | | | Eₑ |
| 817 | E₁ₐ | | E₄* | Eₑ |
| 818 | E_{1b} | | E₄* | Eₑ |
| 819 | E₁ₐE₅ | | E₄* | Eₑ |
| 820 | E_{1b}E₅ | | E₄* | Eₑ |
| 821 | E₁ₐEᵢ | | E₄* | Eₑ |
| 822 | E_{1b}Eᵢ | | E₄* | Eₑ |
| 823 | E₁ₐEᵢᵢ | | E₄* | Eₑ |
| 824 | E_{1b}Eᵢᵢ | | E₄* | Eₑ |
| 825 | E₁ₐEᵢᵢE_{iib} | | E₄* | Eₑ |
| 826 | E_{1b}EᵢᵢE_{iib} | | E₄* | Eₑ |
| 827 | E₁ₐE₅Eᵢ | | E₄* | Eₑ |
| 828 | E_{1b}E₅Eᵢ | | E₄* | Eₑ |
| 829 | E₁ₐE₅Eᵢᵢ | | E₄* | Eₑ |
| 830 | E_{1b}E₅Eᵢᵢ | | E₄* | Eₑ |
| 831 | E₁ₐE₅EᵢᵢE_{iib} | | E₄* | Eₑ |
| 832 | E_{1b}E₅EᵢᵢE_{iib} | | E₄* | Eₑ |
| 833 | E₁ₐE₄ | | E₄* | Eₑ |
| 834 | E_{1b}E₄ | | E₄* | Eₑ |
| 835 | E₁ₐE₅E₄ | | E₄* | Eₑ |
| 836 | E_{1b}E₅E₄ | | E₄* | Eₑ |
| 837 | E₁ₐEᵢE₄ | | E₄* | Eₑ |
| 838 | E_{1b}EᵢE₄ | | E₄* | Eₑ |
| 839 | E₁ₐEᵢᵢE₄ | | E₄* | Eₑ |
| 840 | E_{1b}EᵢᵢE₄ | | E₄* | Eₑ |
| 841 | E₁ₐEᵢᵢE_{iib}E₄ | | E₄* | Eₑ |
| 842 | E_{1b}EᵢᵢE_{iib}E₄ | | E₄* | Eₑ |
| 843 | E₁ₐE₅EᵢE₄ | | E₄* | Eₑ |
| 844 | E_{1b}E₅EᵢE₄ | | E₄* | Eₑ |
| 845 | E₁ₐE₅EᵢᵢE₄ | | E₄* | Eₑ |
| 846 | E_{1b}E₅EᵢᵢE₄ | | E₄* | Eₑ |
| 847 | E₁ₐE₅EᵢᵢE_{iib}E₄ | | E₄* | Eₑ |
| 848 | E_{1b}E₅EᵢᵢE_{iib}E₄ | | E₄* | Eₑ |
| 849 | E₁ₐEᵢᵢᵢ | | E₄* | Eₑ |
| 850 | E_{1b}Eᵢᵢᵢ | | E₄* | Eₑ |
| 851 | E₁ₐE₅Eᵢᵢᵢ | | E₄* | Eₑ |
| 852 | E_{1b}E₅Eᵢᵢᵢ | | E₄* | Eₑ |
| 853 | E₁ₐEᵢᵢᵢE₄ | | E₄* | Eₑ |
| 854 | E_{1b}EᵢᵢᵢE₄ | | E₄* | Eₑ |
| 855 | E₁ₐE₅EᵢᵢᵢE₄ | | E₄* | Eₑ |
| 856 | E_{1b}E₅EᵢᵢᵢE₄ | | E₄* | Eₑ |
| 857 | E₁ₐEᵢᵥ | | E₄* | Eₑ |
| 858 | E_{1b}Eᵢᵥ | | E₄* | Eₑ |
| 859 | E₁ₐE₅Eᵢᵥ | | E₄* | Eₑ |
| 860 | E_{1b}E₅Eᵢᵥ | | E₄* | Eₑ |
| 861 | E₁ₐEᵢᵥE₄ | | E₄* | Eₑ |
| 862 | E_{1b}EᵢᵥE₄ | | E₄* | Eₑ |
| 863 | E₁ₐE₅EᵢᵥE₄ | | E₄* | Eₑ |
| 864 | E_{1b}E₅EᵢᵥE₄ | | E₄* | Eₑ |
| 865 | E₁ₐ | AlkL | | Eₑ |
| 866 | E_{1b} | AlkL | | Eₑ |
| 867 | E₁ₐE₅ | AlkL | | Eₑ |
| 868 | E_{1b}E₅ | AlkL | | Eₑ |
| 869 | E₁ₐEᵢ | AlkL | | Eₑ |
| 870 | E_{1b}Eᵢ | AlkL | | Eₑ |
| 871 | E₁ₐEᵢᵢ | AlkL | | Eₑ |
| 872 | E_{1b}Eᵢᵢ | AlkL | | Eₑ |
| 873 | E₁ₐEᵢᵢE_{iib} | AlkL | | Eₑ |
| 874 | E_{1b}EᵢᵢE_{iib} | AlkL | | Eₑ |
| 875 | E₁ₐE₅Eᵢ | AlkL | | Eₑ |
| 876 | E_{1b}E₅Eᵢ | AlkL | | Eₑ |
| 877 | E₁ₐE₅Eᵢᵢ | AlkL | | Eₑ |
| 878 | E_{1b}E₅Eᵢᵢ | AlkL | | Eₑ |
| 879 | E₁ₐE₅EᵢᵢE_{iib} | AlkL | | Eₑ |
| 880 | E_{1b}E₅EᵢᵢE_{iib} | AlkL | | Eₑ |
| 881 | E₁ₐE₄ | AlkL | | Eₑ |
| 882 | E_{1b}E₄ | AlkL | | Eₑ |
| 883 | E₁ₐE₅E₄ | AlkL | | Eₑ |
| 884 | E_{1b}E₅E₄ | AlkL | | Eₑ |
| 885 | E₁ₐEᵢE₄ | AlkL | | Eₑ |
| 886 | E_{1b}EᵢE₄ | AlkL | | Eₑ |
| 887 | E₁ₐEᵢᵢE₄ | AlkL | | Eₑ |
| 888 | E_{1b}EᵢᵢE₄ | AlkL | | Eₑ |
| 889 | E₁ₐEᵢᵢE_{iib}E₄ | AlkL | | Eₑ |
| 890 | E_{1b}EᵢᵢE_{iib}E₄ | AlkL | | Eₑ |
| 891 | E₁ₐE₅EᵢE₄ | AlkL | | Eₑ |
| 892 | E_{1b}E₅EᵢE₄ | AlkL | | Eₑ |
| 893 | E₁ₐE₅EᵢᵢE₄ | AlkL | | Eₑ |
| 894 | E_{1b}E₅EᵢᵢE₄ | AlkL | | Eₑ |
| 895 | E₁ₐE₅EᵢᵢE_{iib}E₄ | AlkL | | Eₑ |
| 896 | E_{1b}E₅EᵢᵢE_{iib}E₄ | AlkL | | Eₑ |
| 897 | E₁ₐEᵢᵢᵢ | AlkL | | Eₑ |
| 898 | E_{1b}Eᵢᵢᵢ | AlkL | | Eₑ |
| 899 | E₁ₐE₅Eᵢᵢᵢ | AlkL | | Eₑ |
| 900 | E_{1b}E₅Eᵢᵢᵢ | AlkL | | Eₑ |
| 901 | E₁ₐEᵢᵢᵢE₄ | AlkL | | Eₑ |
| 902 | E_{1b}EᵢᵢᵢE₄ | AlkL | | Eₑ |
| 903 | E₁ₐE₅EᵢᵢᵢE₄ | AlkL | | Eₑ |
| 904 | E_{1b}E₅EᵢᵢᵢE₄ | AlkL | | Eₑ |
| 905 | E₁ₐEᵢᵥ | AlkL | | Eₑ |
| 906 | E_{1b}Eᵢᵥ | AlkL | | Eₑ |
| 907 | E₁ₐE₅Eᵢᵥ | AlkL | | Eₑ |
| 908 | E_{1b}E₅Eᵢᵥ | AlkL | | Eₑ |
| 909 | E₁ₐEᵢᵥE₄ | AlkL | | Eₑ |
| 910 | E_{1b}EᵢᵥE₄ | AlkL | | Eₑ |
| 911 | E₁ₐE₅EᵢᵥE₄ | AlkL | | Eₑ |
| 912 | E_{1b}E₅EᵢᵥE₄ | AlkL | | Eₑ |
| 913 | E₁ₐ | AlkL | E₄* | Eₑ |
| 914 | E_{1b} | AlkL | E₄* | Eₑ |
| 915 | E₁ₐE₅ | AlkL | E₄* | Eₑ |
| 916 | E_{1b}E₅ | AlkL | E₄* | Eₑ |
| 917 | E₁ₐEᵢ | AlkL | E₄* | Eₑ |
| 918 | E_{1b}Eᵢ | AlkL | E₄* | Eₑ |
| 919 | E₁ₐEᵢᵢ | AlkL | E₄* | Eₑ |
| 920 | E_{1b}Eᵢᵢ | AlkL | E₄* | Eₑ |
| 921 | E₁ₐEᵢᵢE_{iib} | AlkL | E₄* | Eₑ |
| 922 | E_{1b}EᵢᵢE_{iib} | AlkL | E₄* | Eₑ |
| 923 | E₁ₐE₅Eᵢ | AlkL | E₄* | Eₑ |
| 924 | E_{1b}E₅Eᵢ | AlkL | E₄* | Eₑ |
| 925 | E₁ₐE₅Eᵢᵢ | AlkL | E₄* | Eₑ |
| 926 | E_{1b}E₅Eᵢᵢ | AlkL | E₄* | Eₑ |
| 927 | E₁ₐE₅EᵢᵢE_{iib} | AlkL | E₄* | Eₑ |
| 928 | E_{1b}E₅EᵢᵢE_{iib} | AlkL | E₄* | Eₑ |
| 929 | E₁ₐE₄ | AlkL | E₄* | Eₑ |
| 930 | E_{1b}E₄ | AlkL | E₄* | Eₑ |
| 931 | E₁ₐE₅E₄ | AlkL | E₄* | Eₑ |
| 932 | E_{1b}E₅E₄ | AlkL | E₄* | Eₑ |
| 933 | E₁ₐEᵢE₄ | AlkL | E₄* | Eₑ |
| 934 | E_{1b}EᵢE₄ | AlkL | E₄* | Eₑ |
| 935 | E₁ₐEᵢᵢE₄ | AlkL | E₄* | Eₑ |
| 936 | E_{1b}EᵢᵢE₄ | AlkL | E₄* | Eₑ |
| 937 | E₁ₐEᵢᵢE_{iib}E₄ | AlkL | E₄* | Eₑ |
| 938 | E_{1b}EᵢᵢE_{iib}E₄ | AlkL | E₄* | Eₑ |
| 939 | E₁ₐE₅EᵢE₄ | AlkL | E₄* | Eₑ |
| 940 | E_{1b}E₅EᵢE₄ | AlkL | E₄* | Eₑ |
| 941 | E₁ₐE₅EᵢᵢE₄ | AlkL | E₄* | Eₑ |
| 942 | E_{1b}E₅EᵢᵢE₄ | AlkL | E₄* | Eₑ |
| 943 | E₁ₐE₅EᵢᵢE_{iib}E₄ | AlkL | E₄* | Eₑ |
| 944 | E_{1b}E₅EᵢᵢE_{iib}E₄ | AlkL | E₄* | Eₑ |
| 945 | E₁ₐEᵢᵢᵢ | AlkL | E₄* | Eₑ |
| 946 | E_{1b}Eᵢᵢᵢ | AlkL | E₄* | Eₑ |
| 947 | E₁ₐE₅Eᵢᵢᵢ | AlkL | E₄* | Eₑ |
| 948 | E_{1b}E₅Eᵢᵢᵢ | AlkL | E₄* | Eₑ |
| 949 | E₁ₐEᵢᵢᵢE₄ | AlkL | E₄* | Eₑ |
| 950 | E_{1b}EᵢᵢᵢE₄ | AlkL | E₄* | Eₑ |
| 951 | E₁ₐE₅EᵢᵢᵢE₄ | AlkL | E₄* | Eₑ |
| 952 | E_{1b}E₅EᵢᵢᵢE₄ | AlkL | E₄* | Eₑ |
| 953 | E₁ₐEᵢᵥ | AlkL | E₄* | Eₑ |
| 954 | E_{1b}Eᵢᵥ | AlkL | E₄* | Eₑ |
| 955 | E₁ₐE₅Eᵢᵥ | AlkL | E₄* | Eₑ |
| 956 | E_{1b}E₅Eᵢᵥ | AlkL | E₄* | Eₑ |
| 957 | E₁ₐEᵢᵥE₄ | AlkL | E₄* | Eₑ |
| 958 | E_{1b}EᵢᵥE₄ | AlkL | E₄* | Eₑ |
| 959 | E₁ₐE₅EᵢᵥE₄ | AlkL | E₄* | Eₑ |
| 960 | E_{1b}E₅EᵢᵥE₄ | AlkL | E₄* | Eₑ |
| 961 | E₁ₐ | | | E_{f} |
| 962 | E_{1b} | | | E_{f} |
| 963 | E₁ₐE₅ | | | E_{f} |
| 964 | E_{1b}E₅ | | | E_{f} |
| 965 | E₁ₐEᵢ | | | E_{f} |
| 966 | E_{1b}Eᵢ | | | E_{f} |
| 967 | E₁ₐEᵢᵢ | | | E_{f} |
| 968 | E_{1b}Eᵢᵢ | | | E_{f} |
| 969 | E₁ₐEᵢᵢE_{iib} | | | E_{f} |
| 970 | E_{1b}EᵢᵢE_{iib} | | | E_{f} |
| 971 | E₁ₐE₅Eᵢ | | | E_{f} |
| 972 | E_{1b}E₅Eᵢ | | | E_{f} |
| 973 | E₁ₐE₅Eᵢᵢ | | | E_{f} |
| 974 | E_{1b}E₅Eᵢᵢ | | | E_{f} |
| 975 | E₁ₐE₅EᵢᵢE_{iib} | | | E_{f} |
| 976 | E_{1b}E₅EᵢᵢE_{iib} | | | E_{f} |
| 977 | E₁ₐE₄ | | | E_{f} |
| 978 | E_{1b}E₄ | | | E_{f} |
| 979 | E₁ₐE₅E₄ | | | E_{f} |
| 980 | E_{1b}E₅E₄ | | | E_{f} |
| 981 | E₁ₐEᵢE₄ | | | E_{f} |
| 982 | E_{1b}EᵢE₄ | | | E_{f} |
| 983 | E₁ₐEᵢᵢE₄ | | | E_{f} |
| 984 | E_{1b}EᵢᵢE₄ | | | E_{f} |
| 985 | E₁ₐEᵢᵢE_{iib}E₄ | | | E_{f} |
| 986 | E_{1b}EᵢᵢE_{iib}E₄ | | | E_{f} |
| 987 | E₁ₐE₅EᵢE₄ | | | E_{f} |
| 988 | E_{1b}E₅EᵢE₄ | | | E_{f} |
| 989 | E₁ₐE₅EᵢᵢE₄ | | | E_{f} |
| 990 | E_{1b}E₅EᵢᵢE₄ | | | E_{f} |
| 991 | E₁ₐE₅EᵢᵢE_{iib}E₄ | | | E_{f} |
| 992 | E_{1b}E₅EᵢᵢE_{iib}E₄ | | | E_{f} |
| 993 | E₁ₐEᵢᵢᵢ | | | E_{f} |
| 994 | E_{1b}Eᵢᵢᵢ | | | E_{f} |
| 995 | E₁ₐE₅Eᵢᵢᵢ | | | E_{f} |
| 996 | E_{1b}E₅Eᵢᵢᵢ | | | E_{f} |
| 997 | E₁ₐEᵢᵢᵢE₄ | | | E_{f} |
| 998 | E_{1b}EᵢᵢᵢE₄ | | | E_{f} |
| 999 | E₁ₐE₅EᵢᵢᵢE₄ | | | E_{f} |
| 1000 | E_{1b}E₅EᵢᵢᵢE₄ | | | E_{f} |
| 1001 | E₁ₐEᵢᵥ | | | E_{f} |
| 1002 | E_{1b}Eᵢᵥ | | | E_{f} |
| 1003 | E₁ₐE₅Eᵢᵥ | | | E_{f} |
| 1004 | E_{1b}E₅Eᵢᵥ | | | E_{f} |
| 1005 | E₁ₐEᵢᵥE₄ | | | E_{f} |
| 1006 | E_{1b}EᵢᵥE₄ | | | E_{f} |
| 1007 | E₁ₐE₅EᵢᵥE₄ | | | E_{f} |
| 1008 | E_{1b}E₅EᵢᵥE₄ | | | E_{f} |
| 1009 | E₁ₐ | | E₄* | E_{f} |
| 1010 | E_{1b} | | E₄* | E_{f} |
| 1011 | E₁ₐE₅ | | E₄* | E_{f} |
| 1012 | E_{1b}E₅ | | E₄* | E_{f} |
| 1013 | E₁ₐEᵢ | | E₄* | E_{f} |
| 1014 | E_{1b}Eᵢ | | E₄* | E_{f} |
| 1015 | E₁ₐEᵢᵢ | | E₄* | E_{f} |
| 1016 | E_{1b}Eᵢᵢ | | E₄* | E_{f} |
| 1017 | E₁ₐEᵢᵢE_{iib} | | E₄* | E_{f} |
| 1018 | E_{1b}EᵢᵢE_{iib} | | E₄* | E_{f} |
| 1019 | E₁ₐE₅Eᵢ | | E₄* | E_{f} |
| 1020 | E_{1b}E₅Eᵢ | | E₄* | E_{f} |
| 1021 | E₁ₐE₅Eᵢᵢ | | E₄* | E_{f} |
| 1022 | E_{1b}E₅Eᵢᵢ | | E₄* | E_{f} |
| 1023 | E₁ₐE₅EᵢᵢE_{iib} | | E₄* | E_{f} |
| 1024 | E_{1b}E₅EᵢᵢE_{iib} | | E₄* | E_{f} |
| 1025 | E₁ₐE₄ | | E₄* | E_{f} |
| 1026 | E_{1b}E₄ | | E₄* | E_{f} |
| 1027 | E₁ₐE₅E₄ | | E₄* | E_{f} |
| 1028 | E_{1b}E₅E₄ | | E₄* | E_{f} |
| 1029 | E₁ₐEᵢE₄ | | E₄* | E_{f} |
| 1030 | E_{1b}EᵢE₄ | | E₄* | E_{f} |
| 1031 | E₁ₐEᵢᵢE₄ | | E₄* | E_{f} |
| 1032 | E_{1b}EᵢᵢE₄ | | E₄* | E_{f} |
| 1033 | E₁ₐEᵢᵢE_{iib}E₄ | | E₄* | E_{f} |
| 1034 | E_{1b}EᵢᵢE_{iib}E₄ | | E₄* | E_{f} |
| 1035 | E₁ₐE₅EᵢE₄ | | E₄* | E_{f} |
| 1036 | E_{1b}E₅EᵢE₄ | | E₄* | E_{f} |
| 1037 | E₁ₐE₅EᵢᵢE₄ | | E₄* | E_{f} |
| 1038 | E_{1b}E₅EᵢᵢE₄ | | E₄* | E_{f} |
| 1039 | E₁ₐE₅EᵢᵢE_{iib}E₄ | | E₄* | E_{f} |
| 1040 | E_{1b}E₅EᵢᵢE_{iib}E₄ | | E₄* | E_{f} |
| 1041 | E₁ₐEᵢᵢᵢ | | E₄* | E_{f} |
| 1042 | E_{1b}Eᵢᵢᵢ | | E₄* | E_{f} |
| 1043 | E₁ₐE₅Eᵢᵢᵢ | | E₄* | E_{f} |
| 1044 | E_{1b}E₅Eᵢᵢᵢ | | E₄* | E_{f} |
| 1045 | E₁ₐEᵢᵢᵢE₄ | | E₄* | E_{f} |
| 1046 | E_{1b}EᵢᵢᵢE₄ | | E₄* | E_{f} |
| 1047 | E₁ₐE₅EᵢᵢᵢE₄ | | E₄* | E_{f} |
| 1048 | E_{1b}E₅EᵢᵢᵢE₄ | | E₄* | E_{f} |
| 1049 | E₁ₐEᵢᵥ | | E₄* | E_{f} |
| 1050 | E_{1b}Eᵢᵥ | | E₄* | E_{f} |
| 1051 | E₁ₐE₅Eᵢᵥ | | E₄* | E_{f} |
| 1052 | E_{1b}E₅Eᵢᵥ | | E₄* | E_{f} |
| 1053 | E₁ₐEᵢᵥE₄ | | E₄* | E_{f} |
| 1054 | E_{1b}EᵢᵥE₄ | | E₄* | E_{f} |
| 1055 | E₁ₐE₅EᵢᵥE₄ | | E₄* | E_{f} |
| 1056 | E_{1b}E₅EᵢᵥE₄ | | E₄* | E_{f} |
| 1057 | E₁ₐ | AlkL | | E_{f} |
| 1058 | E_{1b} | AlkL | | E_{f} |
| 1059 | E₁ₐE₅ | AlkL | | E_{f} |
| 1060 | E_{1b}E₅ | AlkL | | E_{f} |
| 1061 | E₁ₐEᵢ | AlkL | | E_{f} |
| 1062 | E_{1b}Eᵢ | AlkL | | E_{f} |
| 1063 | E₁ₐEᵢᵢ | AlkL | | E_{f} |
| 1064 | E_{1b}Eᵢᵢ | AlkL | | E_{f} |
| 1065 | E₁ₐEᵢᵢE_{iib} | AlkL | | E_{f} |
| 1066 | E_{1b}EᵢᵢE_{iib} | AlkL | | E_{f} |
| 1067 | E₁ₐE₅Eᵢ | AlkL | | E_{f} |
| 1068 | E_{1b}E₅Eᵢ | AlkL | | E_{f} |
| 1069 | E₁ₐE₅Eᵢᵢ | AlkL | | E_{f} |
| 1070 | E_{1b}E₅Eᵢᵢ | AlkL | | E_{f} |
| 1071 | E₁ₐE₅EᵢᵢE_{iib} | AlkL | | E_{f} |
| 1072 | E_{1b}E₅EᵢᵢE_{iib} | AlkL | | E_{f} |
| 1073 | E₁ₐE₄ | AlkL | | E_{f} |
| 1074 | E_{1b}E₄ | AlkL | | E_{f} |
| 1075 | E₁ₐE₅E₄ | AlkL | | E_{f} |
| 1076 | E_{1b}E₅E₄ | AlkL | | E_{f} |
| 1077 | E₁ₐEᵢE₄ | AlkL | | E_{f} |
| 1078 | E_{1b}EᵢE₄ | AlkL | | E_{f} |
| 1079 | E₁ₐEᵢᵢE₄ | AlkL | | E_{f} |
| 1080 | E_{1b}EᵢᵢE₄ | AlkL | | E_{f} |
| 1081 | E₁ₐEᵢᵢE_{iib}E₄ | AlkL | | E_{f} |
| 1082 | E_{1b}EᵢᵢE_{iib}E₄ | AlkL | | E_{f} |
| 1083 | E₁ₐE₅EᵢE₄ | AlkL | | E_{f} |
| 1084 | E_{1b}E₅EᵢE₄ | AlkL | | E_{f} |
| 1085 | E₁ₐE₅EᵢᵢE₄ | AlkL | | E_{f} |
| 1086 | E_{1b}E₅EᵢᵢE₄ | AlkL | | E_{f} |
| 1087 | E₁ₐE₅EᵢᵢE_{iib}E₄ | AlkL | | E_{f} |
| 1088 | E_{1b}E₅EᵢᵢE_{iib}E₄ | AlkL | | E_{f} |
| 1089 | E₁ₐEᵢᵢᵢ | AlkL | | E_{f} |
| 1090 | E_{1b}Eᵢᵢᵢ | AlkL | | E_{f} |
| 1091 | E₁ₐE₅Eᵢᵢᵢ | AlkL | | E_{f} |
| 1092 | E_{1b}E₅Eᵢᵢᵢ | AlkL | | E_{f} |
| 1093 | E₁ₐEᵢᵢᵢE₄ | AlkL | | E_{f} |
| 1094 | E_{1b}EᵢᵢᵢE₄ | AlkL | | E_{f} |
| 1095 | E₁ₐE₅EᵢᵢᵢE₄ | AlkL | | E_{f} |
| 1096 | E_{1b}E₅EᵢᵢᵢE₄ | AlkL | | E_{f} |
| 1097 | E₁ₐEᵢᵥ | AlkL | | E_{f} |
| 1098 | E_{1b}Eᵢᵥ | AlkL | | E_{f} |
| 1099 | E₁ₐE₅Eᵢᵥ | AlkL | | E_{f} |
| 1100 | E_{1b}E₅Eᵢᵥ | AlkL | | E_{f} |
| 1101 | E₁ₐEᵢᵥE₄ | AlkL | | E_{f} |
| 1102 | E_{1b}EᵢᵥE₄ | AlkL | | E_{f} |
| 1103 | E₁ₐE₅EᵢᵥE₄ | AlkL | | E_{f} |
| 1104 | E_{1b}E₅EᵢᵥE₄ | AlkL | | E_{f} |
| 1105 | E₁ₐ | AlkL | E₄* | E_{f} |
| 1106 | E_{1b} | AlkL | E₄* | E_{f} |
| 1107 | E₁ₐE₅ | AlkL | E₄* | E_{f} |
| 1108 | E_{1b}E₅ | AlkL | E₄* | E_{f} |
| 1109 | E₁ₐEᵢ | AlkL | E₄* | E_{f} |
| 1110 | E_{1b}Eᵢ | AlkL | E₄* | E_{f} |
| 1111 | E₁ₐEᵢᵢ | AlkL | E₄* | E_{f} |
| 1112 | E_{1b}Eᵢᵢ | AlkL | E₄* | E_{f} |
| 1113 | E₁ₐEᵢᵢE_{iib} | AlkL | E₄* | E_{f} |
| 1114 | E_{1b}EᵢᵢE_{iib} | AlkL | E₄* | E_{f} |
| 1115 | E₁ₐE₅Eᵢ | AlkL | E₄* | E_{f} |
| 1116 | E_{1b}E₅Eᵢ | AlkL | E₄* | E_{f} |
| 1117 | E₁ₐE₅Eᵢᵢ | AlkL | E₄* | E_{f} |
| 1118 | E_{1b}E₅Eᵢᵢ | AlkL | E₄* | E_{f} |
| 1119 | E₁ₐE₅EᵢᵢE_{iib} | AlkL | E₄* | E_{f} |
| 1120 | E_{1b}E₅EᵢᵢE_{iib} | AlkL | E₄* | E_{f} |
| 1121 | E₁ₐE₄ | AlkL | E₄* | E_{f} |
| 1122 | E_{1b}E₄ | AlkL | E₄* | E_{f} |
| 1123 | E₁ₐE₅E₄ | AlkL | E₄* | E_{f} |
| 1124 | E_{1b}E₅E₄ | AlkL | E₄* | E_{f} |
| 1125 | E₁ₐEᵢE₄ | AlkL | E₄* | E_{f} |
| 1126 | E_{1b}EᵢE₄ | AlkL | E₄* | E_{f} |
| 1127 | E₁ₐEᵢᵢE₄ | AlkL | E₄* | E_{f} |
| 1128 | E_{1b}EᵢᵢE₄ | AlkL | E₄* | E_{f} |
| 1129 | E₁ₐEᵢᵢE_{iib}E₄ | AlkL | E₄* | E_{f} |
| 1130 | E_{1b}EᵢᵢE_{iib}E₄ | AlkL | E₄* | E_{f} |
| 1131 | E₁ₐE₅EᵢE₄ | AlkL | E₄* | E_{f} |
| 1132 | E_{1b}E₅EᵢE₄ | AlkL | E₄* | E_{f} |
| 1133 | E₁ₐE₅EᵢᵢE₄ | AlkL | E₄* | E_{f} |
| 1134 | E_{1b}E₅EᵢᵢE₄ | AlkL | E₄* | E_{f} |
| 1135 | E₁ₐE₅EᵢᵢE_{iib}E₄ | AlkL | E₄* | E_{f} |
| 1136 | E_{1b}E₅EᵢᵢE_{iib}E₄ | AlkL | E₄* | E_{f} |
| 1137 | E₁ₐEᵢᵢᵢ | AlkL | E₄* | E_{f} |
| 1138 | E_{1b}Eᵢᵢᵢ | AlkL | E₄* | E_{f} |
| 1139 | E₁ₐE₅Eᵢᵢᵢ | AlkL | E₄* | E_{f} |
| 1140 | E_{1b}E₅Eᵢᵢᵢ | AlkL | E₄* | E_{f} |
| 1141 | E₁ₐEᵢᵢᵢE₄ | AlkL | E₄* | E_{f} |
| 1142 | E_{1b}EᵢᵢᵢE₄ | AlkL | E₄* | E_{f} |
| 1143 | E₁ₐE₅EᵢᵢᵢE₄ | AlkL | E₄* | E_{f} |
| 1144 | E_{1b}E₅EᵢᵢᵢE₄ | AlkL | E₄* | E_{f} |
| 1145 | E₁ₐEᵢᵥ | AlkL | E₄* | E_{f} |
| 1146 | E_{1b}Eᵢᵥ | AlkL | E₄* | E_{f} |
| 1147 | E₁ₐE₅Eᵢᵥ | AlkL | E₄* | E_{f} |
| 1148 | E_{1b}E₅Eᵢᵥ | AlkL | E₄* | E_{f} |
| 1149 | E₁ₐEᵢᵥE₄ | AlkL | E₄* | E_{f} |
| 1150 | E_{1b}EᵢᵥE₄ | AlkL | E₄* | E_{f} |
| 1151 | E₁ₐE₅EᵢᵥE₄ | AlkL | E₄* | E_{f} |
| 1152 | E_{1b}E₅EᵢᵥE₄ | AlkL | E₄* | E_{f} |

[0198] Microorganisms quite especially preferred according to the invention (abbreviated as MO) are outstandingly suitable for the production of ω-carboxycarboxylate esters and have increased or decreased enzyme activities (abbreviated as E) described in the following table, where these can in addition advantageously be combined with an increased enzyme activity compared to the wild type of the microorganism, which is described for the 3-ketoacyl-ACP (Acyl Carrrier Protein) synthase III (EC 2.3.1.41), in particular that from plants, preferably that from plants the seeds whereof contain fatty acids with alkyl residues shorter than 14 C atoms, and particularly preferably that from plants of the genera Cuphea, Elaeis, Cocos, Umbellularia and Cinnamomum and gene products selected from AccA, AccB, AccC, AccD, AceE, AceF, Lpd, AcpP, FabA, FabB, FabD, FabF, FabG, FabH, Fabl, FabZ, PanD, PanK, UdhA, PntA or PntB.

[0199] Any combinations of at least two of these enzyme activities can advantageously be increased.

[0200] In addition, moreover, it can be advantageous if the microorganism is provided with a lower enzyme activity compared to the wild type of the microorganism, which is described for the gene products selected from TdcE, PflA, PflB, PflC, PflD, PoxB, YgfG, AckA, AckB, TdcD, Pta, LdhA, AdhE, MgsA, FdnG, FdnH, FdnI, FdhF, FdoG, FdoH, FdoI, PrpC, PrpD, PrpF, PrpB, TdcD, Pdc, PorA, PorB, PorC, PorD, AlsS, IlvB, IlvM, IlvN, IlvG, IlyI, IlvH, AlsD, ButB, Thl, ThlA, ThlB, PhaA, PhaB, Crt, BdhA, BdhB, Adc, Adh, CtfB, AtoA, AtoD, LdhL, GltA, FabR, FhuA, Dld, LldA or LldP, singly or in any combination.

| | | |
|---|---|---|
| MO | E increased | E decreased |

| | | | | |
|---|---|---|---|---|
| 1 | E₁ₐ | EᵥEᵥᵢ | | |
| 2 | E_{1b} | EᵥEᵥᵢ | | |
| 3 | E₁ₐE₅ | EᵥEᵥᵢ | | |
| 4 | E_{1b}E₅ | EᵥEᵥᵢ | | |
| 5 | E₁ₐEᵢ | EᵥEᵥᵢ | | |
| 6 | E_{1b}Eᵢ | EᵥEᵥᵢ | | |
| 7 | E₁ₐEᵢᵢ | EᵥEᵥᵢ | | |
| 8 | E_{1b}Eᵢᵢ | EᵥEᵥᵢ | | |
| 9 | E₁ₐEᵢᵢE_{iib} | EᵥEᵥᵢ | | |
| 10 | E_{1b}EᵢᵢE_{iib} | EᵥEᵥᵢ | | |
| 11 | E₁ₐE₅Eᵢ | EᵥEᵥᵢ | | |
| 12 | E_{1b}E₅Eᵢ | EᵥEᵥᵢ | | |
| 13 | E₁ₐE₅Eᵢᵢ | EᵥEᵥᵢ | | |
| 14 | E_{1b}E₅Eᵢᵢ | EᵥEᵥᵢ | | |
| 15 | E₁ₐE₅EᵢᵢE_{iib} | EᵥEᵥᵢ | | |
| 16 | E_{1b}E₅EᵢᵢE_{iib} | EᵥEᵥᵢ | | |
| 17 | E₁ₐE₄ | EᵥEᵥᵢ | | |
| 18 | E_{1b}E₄ | EᵥEᵥᵢ | | |
| 19 | E₁ₐE₅E₄ | EᵥEᵥᵢ | | |
| 20 | E_{1b}E₅E₄ | EᵥEᵥᵢ | | |
| 21 | E₁ₐEᵢE₄ | EᵥEᵥᵢ | | |
| 22 | E_{1b}EᵢE₄ | EᵥEᵥᵢ | | |
| 23 | E₁ₐEᵢᵢE₄ | EᵥEᵥᵢ | | |
| 24 | E_{1b}EᵢᵢE₄ | EᵥEᵥᵢ | | |
| 25 | E₁ₐEᵢᵢE_{iib}E₄ | EᵥEᵥᵢ | | |
| 26 | E_{1b}EᵢᵢE_{iib}E₄ | EᵥEᵥᵢ | | |
| 27 | E₁ₐE₅EᵢE₄ | EᵥEᵥᵢ | | |
| 28 | E_{1b}E₅EᵢE₄ | EᵥEᵥᵢ | | |
| 29 | E₁ₐE₅EᵢᵢE₄ | EᵥEᵥᵢ | | |
| 30 | E_{1b}E₅EᵢᵢE₄ | EᵥEᵥᵢ | | |
| 31 | E₁ₐE₅EᵢᵢE_{iib}E₄ | EᵥEᵥᵢ | | |
| 32 | E_{1b}E₅EᵢᵢE_{iib}E₄ | EᵥEᵥᵢ | | |
| 33 | E₁ₐEᵢᵢᵢ | EᵥEᵥᵢ | | |
| 34 | E_{1b}Eᵢᵢᵢ | EᵥEᵥᵢ | | |
| 35 | E₁ₐE₅Eᵢᵢᵢ | EᵥEᵥᵢ | | |
| 36 | E_{1b}E₅Eᵢᵢᵢ | EᵥEᵥᵢ | | |
| 37 | E₁ₐEᵢᵢᵢE₄ | EᵥEᵥᵢ | | |
| 38 | E_{1b}EᵢᵢᵢE₄ | EᵥEᵥᵢ | | |
| 39 | E₁ₐE₅EᵢᵢᵢE₄ | EᵥEᵥᵢ | | |
| 40 | E_{1b}E₅EᵢᵢᵢE₄ | EᵥEᵥᵢ | | |
| 41 | E₁ₐEᵢᵥ | EᵥEᵥᵢ | | |
| 42 | E_{1b}Eᵢᵥ | EᵥEᵥᵢ | | |
| 43 | E₁ₐE₅Eᵢᵥ | EᵥEᵥᵢ | | |
| 44 | E_{1b}E₅Eᵢᵥ | EᵥEᵥᵢ | | |
| 45 | E₁ₐEᵢᵥE₄ | EᵥEᵥᵢ | | |
| 46 | E_{1b}EᵢᵥE₄ | EᵥEᵥᵢ | | |
| 47 | E₁ₐE₅EᵢᵥE₄ | EᵥEᵥᵢ | | |
| 48 | E_{1b}E₅EᵢᵥE₄ | EᵥEᵥᵢ | | |
| 49 | E₁ₐ | EᵥEᵥᵢ | E₄* | |
| 50 | E_{1b} | EᵥEᵥᵢ | E₄* | |
| 51 | E₁ₐE₅ | EᵥEᵥᵢ | E₄* | |
| 52 | E_{1b}E₅ | EᵥEᵥᵢ | E₄* | |
| 53 | E₁ₐEᵢ | EᵥEᵥᵢ | E₄* | |
| 54 | E_{1b}Eᵢ | EᵥEᵥᵢ | E₄* | |
| 55 | E₁ₐEᵢᵢ | EᵥEᵥᵢ | E₄* | |
| 56 | E_{1b}Eᵢᵢ | EᵥEᵥᵢ | E₄* | |
| 57 | E₁ₐEᵢᵢE_{iib} | EᵥEᵥᵢ | E₄* | |
| 58 | E_{1b}EᵢᵢE_{iib} | EᵥEᵥᵢ | E₄* | |
| 59 | E₁ₐE₅Eᵢ | EᵥEᵥᵢ | E₄* | |
| 60 | E_{1b}E₅Eᵢ | EᵥEᵥᵢ | E₄* | |
| 61 | E₁ₐE₅Eᵢᵢ | EᵥEᵥᵢ | E₄* | |
| 62 | E_{1b}E₅Eᵢᵢ | EᵥEᵥᵢ | E₄* | |
| 63 | E₁ₐE₅EᵢᵢE_{iib} | EᵥEᵥᵢ | E₄* | |
| 64 | E_{1b}E₅EᵢᵢE_{iib} | EᵥEᵥᵢ | E₄* | |
| 65 | E₁ₐE₄ | EᵥEᵥᵢ | E₄* | |
| 66 | E_{1b}E₄ | EᵥEᵥᵢ | E₄* | |
| 67 | E₁ₐE₅E₄ | EᵥEᵥᵢ | E₄* | |
| 68 | E_{1b}E₅E₄ | EᵥEᵥᵢ | E₄* | |
| 69 | E₁ₐEᵢE₄ | EᵥEᵥᵢ | E₄* | |
| 70 | E_{1b}EᵢE₄ | EᵥEᵥᵢ | E₄* | |
| 71 | E₁ₐEᵢᵢE₄ | EᵥEᵥᵢ | E₄* | |
| 72 | E_{1b}EᵢᵢE₄ | EᵥEᵥᵢ | E₄* | |
| 73 | E₁ₐEᵢᵢE_{iib}E₄ | EᵥEᵥᵢ | E₄* | |
| 74 | E_{1b}EᵢᵢE_{iib}E₄ | EᵥEᵥᵢ | E₄* | |
| 75 | E₁ₐE₅EᵢE₄ | EᵥEᵥᵢ | E₄* | |
| 76 | E_{1b}E₅EᵢE₄ | EᵥEᵥᵢ | E₄* | |
| 77 | E₁ₐE₅EᵢᵢE₄ | EᵥEᵥᵢ | E₄* | |
| 78 | E_{1b}E₅EᵢᵢE₄ | EᵥEᵥᵢ | E₄* | |
| 79 | E₁ₐE₅EᵢᵢE_{iib}E₄ | EᵥEᵥᵢ | E₄* | |
| 80 | E_{1b}E₅EᵢᵢE_{iib}E₄ | EᵥEᵥᵢ | E₄* | |
| 81 | E₁ₐEᵢᵢᵢ | EᵥEᵥᵢ | E₄* | |
| 82 | E_{1b}Eᵢᵢᵢ | EᵥEᵥᵢ | E₄* | |
| 83 | E₁ₐE₅Eᵢᵢᵢ | EᵥEᵥᵢ | E₄* | |
| 84 | E_{1b}E₅Eᵢᵢᵢ | EᵥEᵥᵢ | E₄* | |
| 85 | E₁ₐEᵢᵢᵢE₄ | EᵥEᵥᵢ | E₄* | |
| 86 | E_{1b}EᵢᵢᵢE₄ | EᵥEᵥᵢ | E₄* | |
| 87 | E₁ₐE₅EᵢᵢᵢE₄ | EᵥEᵥᵢ | E₄* | |
| 88 | E_{1b}E₅EᵢᵢᵢE₄ | EᵥEᵥᵢ | E₄* | |
| 89 | E₁ₐEᵢᵥ | EᵥEᵥᵢ | E₄* | |
| 90 | E_{1b}Eᵢᵥ | EᵥEᵥᵢ | E₄* | |
| 91 | E₁ₐE₅Eᵢᵥ | EᵥEᵥᵢ | E₄* | |
| 92 | E_{1b}E₅Eᵢᵥ | EᵥEᵥᵢ | E₄* | |
| 93 | E₁ₐEᵢᵥE₄ | EᵥEᵥᵢ | E₄* | |
| 94 | E_{1b}EᵢᵥE₄ | EᵥEᵥᵢ | E₄* | |
| 95 | E₁ₐE₅EᵢᵥE₄ | EᵥEᵥᵢ | E₄* | |
| 96 | E_{1b}E₅EᵢᵥE₄ | EᵥEᵥᵢ | E₄* | |
| 97 | E₁ₐ | AlkLEᵥEᵥᵢ | | |
| 98 | E_{1b} | AlkLEᵥEᵥᵢ | | |
| 99 | E₁ₐE₅ | AlkLEᵥEᵥᵢ | | |
| 100 | E_{1b}E₅ | AlkLEᵥEᵥᵢ | | |
| 101 | E₁ₐEᵢ | AlkLEᵥEᵥᵢ | | |
| 102 | E_{1b}Eᵢ | AlkLEᵥEᵥᵢ | | |
| 103 | E₁ₐEᵢᵢ | AlkLEᵥEᵥᵢ | | |
| 104 | E_{1b}Eᵢᵢ | AlkLEᵥEᵥᵢ | | |
| 105 | E₁ₐEᵢᵢE_{iib} | AlkLEᵥEᵥᵢ | | |
| 106 | E_{1b}EᵢᵢE_{iib} | AlkLEᵥEᵥᵢ | | |
| 107 | E₁ₐE₅Eᵢ | AlkLEᵥEᵥᵢ | | |
| 108 | E_{1b}E₅Eᵢ | AlkLEᵥEᵥᵢ | | |
| 109 | E₁ₐE₅Eᵢᵢ | AlkLEᵥEᵥᵢ | | |
| 110 | E_{1b}E₅Eᵢᵢ | AlkLEᵥEᵥᵢ | | |
| 111 | E₁ₐE₅EᵢᵢE_{iib} | AlkLEᵥEᵥᵢ | | |
| 112 | E_{1b}E₅EᵢᵢE_{iib} | AlkLEᵥEᵥᵢ | | |
| 113 | E₁ₐE₄ | AlkLEᵥEᵥᵢ | | |
| 114 | E_{1b}E₄ | AlkLEᵥEᵥᵢ | | |
| 115 | E₁ₐE₅E₄ | AlkLEᵥEᵥᵢ | | |
| 116 | E_{1b}E₅E₄ | AlkLEᵥEᵥᵢ | | |
| 117 | E₁ₐEᵢE₄ | AlkLEᵥEᵥᵢ | | |
| 118 | E_{1b}EᵢE₄ | AlkLEᵥEᵥᵢ | | |
| 119 | E₁ₐEᵢᵢE₄ | AlkLEᵥEᵥᵢ | | |
| 120 | E_{1b}EᵢᵢE₄ | AlkLEᵥEᵥᵢ | | |
| 121 | E₁ₐEᵢᵢE_{iib}E₄ | AlkLEᵥEᵥᵢ | | |
| 122 | E_{1b}EᵢᵢE_{iib}E₄ | AlkLEᵥEᵥᵢ | | |
| 123 | E₁ₐE₅EᵢE₄ | AlkLEᵥEᵥᵢ | | |
| 124 | E_{1b}E₅EᵢE₄ | AlkLEᵥEᵥᵢ | | |
| 125 | E₁ₐE₅EᵢᵢE₄ | AlkLEᵥEᵥᵢ | | |
| 126 | E_{1b}E₅EᵢᵢE₄ | AlkLEᵥEᵥᵢ | | |
| 127 | E₁ₐE₅EᵢᵢE_{iib}E₄ | AlkLEᵥEᵥᵢ | | |
| 128 | E_{1b}E₅EᵢᵢE_{iib}E₄ | AlkLEᵥEᵥᵢ | | |
| 129 | E₁ₐEᵢᵢᵢ | AlkLEᵥEᵥᵢ | | |
| 130 | E_{1b}Eᵢᵢᵢ | AlkLEᵥEᵥᵢ | | |
| 131 | E₁ₐE₅Eᵢᵢᵢ | AlkLEᵥEᵥᵢ | | |
| 132 | E_{1b}E₅Eᵢᵢᵢ | AlkLEᵥEᵥᵢ | | |
| 133 | E₁ₐEᵢᵢᵢE₄ | AlkLEᵥEᵥᵢ | | |
| 134 | E_{1b}EᵢᵢᵢE₄ | AlkLEᵥEᵥᵢ | | |
| 135 | E₁ₐE₅EᵢᵢᵢE₄ | AlkLEᵥEᵥᵢ | | |
| 136 | E_{1b}E₅EᵢᵢᵢE₄ | AlkLEᵥEᵥᵢ | | |
| 137 | E₁ₐEᵢᵥ | AlkLEᵥEᵥᵢ | | |
| 138 | E_{1b}Eᵢᵥ | AlkLEᵥEᵥᵢ | | |
| 139 | E₁ₐE₅Eᵢᵥ | AlkLEᵥEᵥᵢ | | |
| 140 | E_{1b}E₅Eᵢᵥ | AlkLEᵥEᵥᵢ | | |
| 141 | E₁ₐEᵢᵥE₄ | AlkLEᵥEᵥᵢ | | |
| 142 | E_{1b}EᵢᵥE₄ | AlkLEᵥEᵥᵢ | | |
| 143 | E₁ₐE₅EᵢᵥE₄ | AlkLEᵥEᵥᵢ | | |
| 144 | E_{1b}E₅EᵢᵥE₄ | AlkLEᵥEᵥᵢ | | |
| 145 | E₁ₐ | AlkLEᵥEᵥᵢ | E₄* | |
| 146 | E_{1b} | AlkLEᵥEᵥᵢ | E₄* | |
| 147 | E₁ₐE₅ | AlkLEᵥEᵥᵢ | E₄* | |
| 148 | E_{1b}E₅ | AlkLEᵥEᵥᵢ | E₄* | |
| 149 | E₁ₐEᵢ | AlkLEᵥEᵥᵢ | E₄* | |
| 150 | E_{1b}Eᵢ | AlkLEᵥEᵥᵢ | E₄* | |
| 151 | E₁ₐEᵢᵢ | AlkLEᵥEᵥᵢ | E₄* | |
| 152 | E_{1b}Eᵢᵢ | AlkLEᵥEᵥᵢ | E₄* | |
| 153 | E₁ₐEᵢᵢE_{iib} | AlkLEᵥEᵥᵢ | E₄* | |
| 154 | E_{1b}EᵢᵢE_{iib} | AlkLEᵥEᵥᵢ | E₄* | |
| 155 | E₁ₐE₅Eᵢ | AlkLEᵥEᵥᵢ | E₄* | |
| 156 | E_{1b}E₅Eᵢ | AlkLEᵥEᵥᵢ | E₄* | |
| 157 | E₁ₐE₅Eᵢᵢ | AlkLEᵥEᵥᵢ | E₄* | |
| 158 | E_{1b}E₅Eᵢᵢ | AlkLEᵥEᵥᵢ | E₄* | |
| 159 | E₁ₐE₅EᵢᵢE_{iib} | AlkLEᵥEᵥᵢ | E₄* | |
| 160 | E_{1b}E₅EᵢᵢE_{iib} | AlkLEᵥEᵥᵢ | E₄* | |
| 161 | E₁ₐE₄ | AlkLEᵥEᵥᵢ | E₄* | |
| 162 | E_{1b}E₄ | AlkLEᵥEᵥᵢ | E₄* | |
| 163 | E₁ₐE₅E₄ | AlkLEᵥEᵥᵢ | E₄* | |
| 164 | E_{1b}E₅E₄ | AlkLEᵥEᵥᵢ | E₄* | |
| 165 | E₁ₐEᵢE₄ | AlkLEᵥEᵥᵢ | E₄* | |
| 166 | E_{1b}EᵢE₄ | AlkLEᵥEᵥᵢ | E₄* | |
| 167 | E₁ₐEᵢᵢE₄ | AlkLEᵥEᵥᵢ | E₄* | |
| 168 | E_{1b}EᵢᵢE₄ | AlkLEᵥEᵥᵢ | E₄* | |
| 169 | E₁ₐEᵢᵢE_{iib}E₄ | AlkLEᵥEᵥᵢ | E₄* | |
| 170 | E_{1b}EᵢᵢE_{iib}E₄ | AlkLEᵥEᵥᵢ | E₄* | |
| 171 | E₁ₐE₅EᵢE₄ | AlkLEᵥEᵥᵢ | E₄* | |
| 172 | E_{1b}E₅EᵢE₄ | AlkLEᵥEᵥᵢ | E₄* | |
| 173 | E₁ₐE₅EᵢᵢE₄ | AlkLEᵥEᵥᵢ | E₄* | |
| 174 | E_{1b}E₅EᵢᵢE₄ | AlkLEᵥEᵥᵢ | E₄* | |
| 175 | E₁ₐE₅EᵢᵢE_{iib}E₄ | AlkLEᵥEᵥᵢ | E₄* | |
| 176 | E_{1b}E₅EᵢᵢE_{iib}E₄ | AlkLEᵥEᵥᵢ | E₄* | |
| 177 | E₁ₐEᵢᵢᵢ | AlkLEᵥEᵥᵢ | E₄* | |
| 178 | E_{1b}Eᵢᵢᵢ | AlkLEᵥEᵥᵢ | E₄* | |
| 179 | E₁ₐE₅Eᵢᵢᵢ | AlkLEᵥEᵥᵢ | E₄* | |
| 180 | E_{1b}E₅Eᵢᵢᵢ | AlkLEᵥEᵥᵢ | E₄* | |
| 181 | E₁ₐEᵢᵢᵢE₄ | AlkLEᵥEᵥᵢ | E₄* | |
| 182 | E_{1b}EᵢᵢᵢE₄ | AlkLEᵥEᵥᵢ | E₄* | |
| 183 | E₁ₐE₅EᵢᵢᵢE₄ | AlkLEᵥEᵥᵢ | E₄* | |
| 184 | E_{1b}E₅EᵢᵢᵢE₄ | AlkLEᵥEᵥᵢ | E₄* | |
| 185 | E₁ₐEᵢᵥ | AlkLEᵥEᵥᵢ | E₄* | |
| 186 | E_{1b}Eᵢᵥ | AlkLEᵥEᵥᵢ | E₄* | |
| 187 | E₁ₐE₅Eᵢᵥ | AlkLEᵥEᵥᵢ | E₄* | |
| 188 | E_{1b}E₅Eᵢᵥ | AlkLEᵥEᵥᵢ | E₄* | |
| 189 | E₁ₐEᵢᵥE₄ | AlkLEᵥEᵥᵢ | E₄* | |
| 190 | E_{1b}EᵢᵥE₄ | AlkLEᵥEᵥᵢ | E₄* | |
| 191 | E₁ₐE₅EᵢᵥE₄ | AlkLEᵥEᵥᵢ | E₄* | |
| 192 | E_{1b}E₅EᵢᵥE₄ | AlkLEᵥEᵥᵢ | E₄* | |
| 193 | E₁ₐ | EᵥEᵥᵢ | | Eₐ |
| 194 | E_{1b} | EᵥEᵥᵢ | | Eₐ |
| 195 | E₁ₐE₅ | EᵥEᵥᵢ | | Eₐ |
| 196 | E_{1b}E₅ | EᵥEᵥᵢ | | Eₐ |
| 197 | E₁ₐEᵢ | EᵥEᵥᵢ | | Eₐ |
| 198 | E_{1b}Eᵢ | EᵥEᵥᵢ | | Eₐ |
| 199 | E₁ₐEᵢᵢ | EᵥEᵥᵢ | | Eₐ |
| 200 | E_{1b}Eᵢᵢ | EᵥEᵥᵢ | | Eₐ |
| 201 | E₁ₐEᵢᵢE_{iib} | EᵥEᵥᵢ | | Eₐ |
| 202 | E_{1b}EᵢᵢE_{iib} | EᵥEᵥᵢ | | Eₐ |
| 203 | E₁ₐE₅Eᵢ | EᵥEᵥᵢ | | Eₐ |
| 204 | E_{1b}E₅Eᵢ | EᵥEᵥᵢ | | Eₐ |
| 205 | E₁ₐE₅Eᵢᵢ | EᵥEᵥᵢ | | Eₐ |
| 206 | E_{1b}E₅Eᵢᵢ | EᵥEᵥᵢ | | Eₐ |
| 207 | E₁ₐE₅EᵢᵢE_{iib} | EᵥEᵥᵢ | | Eₐ |
| 208 | E_{1b}E₅EᵢᵢE_{iib} | EᵥEᵥᵢ | | Eₐ |
| 209 | E₁ₐE₄ | EᵥEᵥᵢ | | Eₐ |
| 210 | E_{1b}E₄ | EᵥEᵥᵢ | | Eₐ |
| 211 | E₁ₐE₅E₄ | EᵥEᵥᵢ | | Eₐ |
| 212 | E_{1b}E₅E₄ | EᵥEᵥᵢ | | Eₐ |
| 213 | E₁ₐEᵢE₄ | EᵥEᵥᵢ | | Eₐ |
| 214 | E_{1b}EᵢE₄ | EᵥEᵥᵢ | | Eₐ |
| 215 | E₁ₐEᵢᵢE₄ | EᵥEᵥᵢ | | Eₐ |
| 216 | E_{1b}EᵢᵢE₄ | EᵥEᵥᵢ | | Eₐ |
| 217 | E₁ₐEᵢᵢE_{iib}E₄ | EᵥEᵥᵢ | | Eₐ |
| 218 | E_{1b}EᵢᵢE_{iib}E₄ | EᵥEᵥᵢ | | Eₐ |
| 219 | E₁ₐE₅EᵢE₄ | EᵥEᵥᵢ | | Eₐ |
| 220 | E_{1b}E₅EᵢE₄ | EᵥEᵥᵢ | | Eₐ |
| 221 | E₁ₐE₅EᵢᵢE₄ | EᵥEᵥᵢ | | Eₐ |
| 222 | E_{1b}E₅EᵢᵢE₄ | EᵥEᵥᵢ | | Eₐ |
| 223 | E₁ₐE₅EᵢᵢE_{iib}E₄ | EᵥEᵥᵢ | | Eₐ |
| 224 | E_{1b}E₅EᵢᵢE_{iib}E₄ | EᵥEᵥᵢ | | Eₐ |
| 225 | E₁ₐEᵢᵢᵢ | EᵥEᵥᵢ | | Eₐ |
| 226 | E_{1b}Eᵢᵢᵢ | EᵥEᵥᵢ | | Eₐ |
| 227 | E₁ₐE₅Eᵢᵢᵢ | EᵥEᵥᵢ | | Eₐ |
| 228 | E_{1b}E₅Eᵢᵢᵢ | EᵥEᵥᵢ | | Eₐ |
| 229 | E₁ₐEᵢᵢᵢE₄ | EᵥEᵥᵢ | | Eₐ |
| 230 | E_{1b}EᵢᵢᵢE₄ | EᵥEᵥᵢ | | Eₐ |
| 231 | E₁ₐE₅EᵢᵢᵢE₄ | EᵥEᵥᵢ | | Eₐ |
| 232 | E_{1b}E₅EᵢᵢᵢE₄ | EᵥEᵥᵢ | | Eₐ |
| 233 | E₁ₐEᵢᵥ | EᵥEᵥᵢ | | Eₐ |
| 234 | E_{1b}Eᵢᵥ | EᵥEᵥᵢ | | Eₐ |
| 235 | E₁ₐE₅Eᵢᵥ | EᵥEᵥᵢ | | Eₐ |
| 236 | E_{1b}E₅Eᵢᵥ | EᵥEᵥᵢ | | Eₐ |
| 237 | E₁ₐEᵢᵥE₄ | EᵥEᵥᵢ | | Eₐ |
| 238 | E_{1b}EᵢᵥE₄ | EᵥEᵥᵢ | | Eₐ |
| 239 | E₁ₐE₅EᵢᵥE₄ | EᵥEᵥᵢ | | Eₐ |
| 240 | E_{1b}E₅EᵢᵥE₄ | EᵥEᵥᵢ | | Eₐ |
| 241 | E₁ₐ | EᵥEᵥᵢ | E₄* | Eₐ |
| 242 | E_{1b} | EᵥEᵥᵢ | E₄* | Eₐ |
| 243 | E₁ₐE₅ | EᵥEᵥᵢ | E₄* | Eₐ |
| 244 | E_{1b}E₅ | EᵥEᵥᵢ | E₄* | Eₐ |
| 245 | E₁ₐEᵢ | EᵥEᵥᵢ | E₄* | Eₐ |
| 246 | E_{1b}Eᵢ | EᵥEᵥᵢ | E₄* | Eₐ |
| 247 | E₁ₐEᵢᵢ | EᵥEᵥᵢ | E₄* | Eₐ |
| 248 | E_{1b}Eᵢᵢ | EᵥEᵥᵢ | E₄* | Eₐ |
| 249 | E₁ₐEᵢᵢE_{iib} | EᵥEᵥᵢ | E₄* | Eₐ |
| 250 | E_{1b}EᵢᵢE_{iib} | EᵥEᵥᵢ | E₄* | Eₐ |
| 251 | E₁ₐE₅Eᵢ | EᵥEᵥᵢ | E₄* | Eₐ |
| 252 | E_{1b}E₅Eᵢ | EᵥEᵥᵢ | E₄* | Eₐ |
| 253 | E₁ₐE₅Eᵢᵢ | EᵥEᵥᵢ | E₄* | Eₐ |
| 254 | E_{1b}E₅Eᵢᵢ | EᵥEᵥᵢ | E₄* | Eₐ |
| 255 | E₁ₐE₅EᵢᵢE_{iib} | EᵥEᵥᵢ | E₄* | Eₐ |
| 256 | E_{1b}E₅EᵢᵢE_{iib} | EᵥEᵥᵢ | E₄* | Eₐ |
| 257 | E₁ₐE₄ | EᵥEᵥᵢ | E₄* | Eₐ |
| 258 | E_{1b}E₄ | EᵥEᵥᵢ | E₄* | Eₐ |
| 259 | E₁ₐE₅E₄ | EᵥEᵥᵢ | E₄* | Eₐ |
| 260 | E_{1b}E₅E₄ | EᵥEᵥᵢ | E₄* | Eₐ |
| 261 | E₁ₐEᵢE₄ | EᵥEᵥᵢ | E₄* | Eₐ |
| 262 | E_{1b}EᵢE₄ | EᵥEᵥᵢ | E₄* | Eₐ |
| 263 | E₁ₐEᵢᵢE₄ | EᵥEᵥᵢ | E₄* | Eₐ |
| 264 | E_{1b}EᵢᵢE₄ | EᵥEᵥᵢ | E₄* | Eₐ |
| 265 | E₁ₐEᵢᵢE_{iib}E₄ | EᵥEᵥᵢ | E₄* | Eₐ |
| 266 | E_{1b}EᵢᵢE_{iib}E₄ | EᵥEᵥᵢ | E₄* | Eₐ |
| 267 | E₁ₐE₅EᵢE₄ | EᵥEᵥᵢ | E₄* | Eₐ |
| 268 | E_{1b}E₅EᵢE₄ | EᵥEᵥᵢ | E₄* | Eₐ |
| 269 | E₁ₐE₅EᵢᵢE₄ | EᵥEᵥᵢ | E₄* | Eₐ |
| 270 | E_{1b}E₅EᵢᵢE₄ | EᵥEᵥᵢ | E₄* | Eₐ |
| 271 | E₁ₐE₅EᵢᵢE_{iib}E₄ | EᵥEᵥᵢ | E₄* | Eₐ |
| 272 | E_{1b}E₅EᵢᵢE_{iib}E₄ | EᵥEᵥᵢ | E₄* | Eₐ |
| 273 | E₁ₐEᵢᵢᵢ | EᵥEᵥᵢ | E₄* | Eₐ |
| 274 | E_{1b}Eᵢᵢᵢ | EᵥEᵥᵢ | E₄* | Eₐ |
| 275 | E₁ₐE₅Eᵢᵢᵢ | EᵥEᵥᵢ | E₄* | Eₐ |
| 276 | E_{1b}E₅Eᵢᵢᵢ | EᵥEᵥᵢ | E₄* | Eₐ |
| 277 | E₁ₐEᵢᵢᵢE₄ | EᵥEᵥᵢ | E₄* | Eₐ |
| 278 | E_{1b}EᵢᵢᵢE₄ | EᵥEᵥᵢ | E₄* | Eₐ |
| 279 | E₁ₐE₅EᵢᵢᵢE₄ | EᵥEᵥᵢ | E₄* | Eₐ |
| 280 | E_{1b}E₅EᵢᵢᵢE₄ | EᵥEᵥᵢ | E₄* | Eₐ |
| 281 | E₁ₐEᵢᵥ | EᵥEᵥᵢ | E₄* | Eₐ |
| 282 | E_{1b}Eᵢᵥ | EᵥEᵥᵢ | E₄* | Eₐ |
| 283 | E₁ₐE₅Eᵢᵥ | EᵥEᵥᵢ | E₄* | Eₐ |
| 284 | E_{1b}E₅Eᵢᵥ | EᵥEᵥᵢ | E₄* | Eₐ |
| 285 | E₁ₐEᵢᵥE₄ | EᵥEᵥᵢ | E₄* | Eₐ |
| 286 | E_{1b}EᵢᵥE₄ | EᵥEᵥᵢ | E₄* | Eₐ |
| 287 | E₁ₐE₅EᵢᵥE₄ | EᵥEᵥᵢ | E₄* | Eₐ |
| 288 | E_{1b}E₅EᵢᵥE₄ | EᵥEᵥᵢ | E₄* | Eₐ |
| 289 | E₁ₐ | AlkLEᵥEᵥᵢ | | Eₐ |
| 290 | E_{1b} | AlkLEᵥEᵥᵢ | | Eₐ |
| 291 | E₁ₐE₅ | AlkLEᵥEᵥᵢ | | Eₐ |
| 292 | E_{1b}E₅ | AlkLEᵥEᵥᵢ | | Eₐ |
| 293 | E₁ₐEᵢ | AlkLEᵥEᵥᵢ | | Eₐ |
| 294 | E_{1b}Eᵢ | AlkLEᵥEᵥᵢ | | Eₐ |
| 295 | E₁ₐEᵢᵢ | AlkLEᵥEᵥᵢ | | Eₐ |
| 296 | E_{1b}Eᵢᵢ | AlkLEᵥEᵥᵢ | | Eₐ |
| 297 | E₁ₐEᵢᵢE_{iib} | AlkLEᵥEᵥᵢ | | Eₐ |
| 298 | E_{1b}EᵢᵢE_{iib} | AlkLEᵥEᵥᵢ | | Eₐ |
| 299 | E₁ₐE₅Eᵢ | AlkLEᵥEᵥᵢ | | Eₐ |
| 300 | E_{1b}E₅Eᵢ | AlkLEᵥEᵥᵢ | | Eₐ |
| 301 | E₁ₐE₅Eᵢᵢ | AlkLEᵥEᵥᵢ | | Eₐ |
| 302 | E_{1b}E₅Eᵢᵢ | AlkLEᵥEᵥᵢ | | Eₐ |
| 303 | E₁ₐE₅EᵢᵢE_{iib} | AlkLEᵥEᵥᵢ | | Eₐ |
| 304 | E_{1b}E₅EᵢᵢE_{iib} | AlkLEᵥEᵥᵢ | | Eₐ |
| 305 | E₁ₐE₄ | AlkLEᵥEᵥᵢ | | Eₐ |
| 306 | E_{1b}E₄ | AlkLEᵥEᵥᵢ | | Eₐ |
| 307 | E₁ₐE₅E₄ | AlkLEᵥEᵥᵢ | | Eₐ |
| 308 | E_{1b}E₅E₄ | AlkLEᵥEᵥᵢ | | Eₐ |
| 309 | E₁ₐEᵢE₄ | AlkLEᵥEᵥᵢ | | Eₐ |
| 310 | E_{1b}EᵢE₄ | AlkLEᵥEᵥᵢ | | Eₐ |
| 311 | E₁ₐEᵢᵢE₄ | AlkLEᵥEᵥᵢ | | Eₐ |
| 312 | E_{1b}EᵢᵢE₄ | AlkLEᵥEᵥᵢ | | Eₐ |
| 313 | E₁ₐEᵢᵢE_{iib}E₄ | AlkLEᵥEᵥᵢ | | Eₐ |
| 314 | E_{1b}EᵢᵢE_{iib}E₄ | AlkLEᵥEᵥᵢ | | Eₐ |
| 315 | E₁ₐE₅EᵢE₄ | AlkLEᵥEᵥᵢ | | Eₐ |
| 316 | E_{1b}E₅EᵢE₄ | AlkLEᵥEᵥᵢ | | Eₐ |
| 317 | E₁ₐE₅EᵢᵢE₄ | AlkLEᵥEᵥᵢ | | Eₐ |
| 318 | E_{1b}E₅EᵢᵢE₄ | AlkLEᵥEᵥᵢ | | Eₐ |
| 319 | E₁ₐE₅EᵢᵢE_{iib}E₄ | AlkLEᵥEᵥᵢ | | Eₐ |
| 320 | E_{1b}E₅EᵢᵢE_{iib}E₄ | AlkLEᵥEᵥᵢ | | Eₐ |
| 321 | E₁ₐEᵢᵢᵢ | AlkLEᵥEᵥᵢ | | Eₐ |
| 322 | E_{1b}Eᵢᵢᵢ | AlkLEᵥEᵥᵢ | | Eₐ |
| 323 | E₁ₐE₅Eᵢᵢᵢ | AlkLEᵥEᵥᵢ | | Eₐ |
| 324 | E_{1b}E₅Eᵢᵢᵢ | AlkLEᵥEᵥᵢ | | Eₐ |
| 325 | E₁ₐEᵢᵢᵢE₄ | AlkLEᵥEᵥᵢ | | Eₐ |
| 326 | E_{1b}EᵢᵢᵢE₄ | AlkLEᵥEᵥᵢ | | Eₐ |
| 327 | E₁ₐE₅EᵢᵢᵢE₄ | AlkLEᵥEᵥᵢ | | Eₐ |
| 328 | E_{1b}E₅EᵢᵢᵢE₄ | AlkLEᵥEᵥᵢ | | Eₐ |
| 329 | E₁ₐEᵢᵥ | AlkLEᵥEᵥᵢ | | Eₐ |
| 330 | E_{1b}Eᵢᵥ | AlkLEᵥEᵥᵢ | | Eₐ |
| 331 | E₁ₐE₅Eᵢᵥ | AlkLEᵥEᵥᵢ | | Eₐ |
| 332 | E_{1b}E₅Eᵢᵥ | AlkLEᵥEᵥᵢ | | Eₐ |
| 333 | E₁ₐEᵢᵥE₄ | AlkLEᵥEᵥᵢ | | Eₐ |
| 334 | E_{1b}EᵢᵥE₄ | AlkLEᵥEᵥᵢ | | Eₐ |
| 335 | E₁ₐE₅EᵢᵥE₄ | AlkLEᵥEᵥᵢ | | Eₐ |
| 336 | E_{1b}E₅EᵢᵥE₄ | AlkLEᵥEᵥᵢ | | Eₐ |
| 337 | E₁ₐ | AlkLEᵥEᵥᵢ | E₄* | Eₐ |
| 338 | E_{1b} | AlkLEᵥEᵥᵢ | E₄* | Eₐ |
| 339 | E₁ₐE₅ | AlkLEᵥEᵥᵢ | E₄* | Eₐ |
| 340 | E_{1b}E₅ | AlkLEᵥEᵥᵢ | E₄* | Eₐ |
| 341 | E₁ₐEᵢ | AlkLEᵥEᵥᵢ | E₄* | Eₐ |
| 342 | E_{1b}Eᵢ | AlkLEᵥEᵥᵢ | E₄* | Eₐ |
| 343 | E₁ₐEᵢᵢ | AlkLEᵥEᵥᵢ | E₄* | Eₐ |
| 344 | E_{1b}Eᵢᵢ | AlkLEᵥEᵥᵢ | E₄* | Eₐ |
| 345 | E₁ₐEᵢᵢE_{iib} | AlkLEᵥEᵥᵢ | E₄* | Eₐ |
| 346 | E_{1b}EᵢᵢE_{iib} | AlkLEᵥEᵥᵢ | E₄* | Eₐ |
| 347 | E₁ₐE₅Eᵢ | AlkLEᵥEᵥᵢ | E₄* | Eₐ |
| 348 | E_{1b}E₅Eᵢ | AlkLEᵥEᵥᵢ | E₄* | Eₐ |
| 349 | E₁ₐE₅Eᵢᵢ | AlkLEᵥEᵥᵢ | E₄* | Eₐ |
| 350 | E_{1b}E₅Eᵢᵢ | AlkLEᵥEᵥᵢ | E₄* | Eₐ |
| 351 | E₁ₐE₅EᵢᵢE_{iib} | AlkLEᵥEᵥᵢ | E₄* | Eₐ |
| 352 | E_{1b}E₅EᵢᵢE_{iib} | AlkLEᵥEᵥᵢ | E₄* | Eₐ |
| 353 | E₁ₐE₄ | AlkLEᵥEᵥᵢ | E₄* | Eₐ |
| 354 | E_{1b}E₄ | AlkLEᵥEᵥᵢ | E₄* | Eₐ |
| 355 | E₁ₐE₅E₄ | AlkLEᵥEᵥᵢ | E₄* | Eₐ |
| 356 | E_{1b}E₅E₄ | AlkLEᵥEᵥᵢ | E₄* | Eₐ |
| 357 | E₁ₐEᵢE₄ | AlkLEᵥEᵥᵢ | E₄* | Eₐ |
| 358 | E_{1b}EᵢE₄ | AlkLEᵥEᵥᵢ | E₄* | Eₐ |
| 359 | E₁ₐEᵢᵢE₄ | AlkLEᵥEᵥᵢ | E₄* | Eₐ |
| 360 | E_{1b}EᵢᵢE₄ | AlkLEᵥEᵥᵢ | E₄* | Eₐ |
| 361 | E₁ₐEᵢᵢE_{iib}E₄ | AlkLEᵥEᵥᵢ | E₄* | Eₐ |
| 362 | E_{1b}EᵢᵢE_{iib}E₄ | AlkLEᵥEᵥᵢ | E₄* | Eₐ |
| 363 | E₁ₐE₅EᵢE₄ | AlkLEᵥEᵥᵢ | E₄* | Eₐ |
| 364 | E_{1b}E₅EᵢE₄ | AlkLEᵥEᵥᵢ | E₄* | Eₐ |
| 365 | E₁ₐE₅EᵢᵢE₄ | AlkLEᵥEᵥᵢ | E₄* | Eₐ |
| 366 | E_{1b}E₅EᵢᵢE₄ | AlkLEᵥEᵥᵢ | E₄* | Eₐ |
| 367 | E₁ₐE₅EᵢᵢE_{iib}E₄ | AlkLEᵥEᵥᵢ | E₄* | Eₐ |
| 368 | E_{1b}E₅EᵢᵢE_{iib}E₄ | AlkLEᵥEᵥᵢ | E₄* | Eₐ |
| 369 | E₁ₐEᵢᵢᵢ | AlkLEᵥEᵥᵢ | E₄* | Eₐ |
| 370 | E_{1b}Eᵢᵢᵢ | AlkLEᵥEᵥᵢ | E₄* | Eₐ |
| 371 | E₁ₐE₅Eᵢᵢᵢ | AlkLEᵥEᵥᵢ | E₄* | Eₐ |
| 372 | E_{1b}E₅Eᵢᵢᵢ | AlkLEᵥEᵥᵢ | E₄* | Eₐ |
| 373 | E₁ₐEᵢᵢᵢE₄ | AlkLEᵥEᵥᵢ | E₄* | Eₐ |
| 374 | E_{1b}EᵢᵢᵢE₄ | AlkLEᵥEᵥᵢ | E₄* | Eₐ |
| 375 | E₁ₐE₅EᵢᵢᵢE₄ | AlkLEᵥEᵥᵢ | E₄* | Eₐ |
| 376 | E_{1b}E₅EᵢᵢᵢE₄ | AlkLEᵥEᵥᵢ | E₄* | Eₐ |
| 377 | E₁ₐEᵢᵥ | AlkLEᵥEᵥᵢ | E₄* | Eₐ |
| 378 | E_{1b}Eᵢᵥ | AlkLEᵥEᵥᵢ | E₄* | Eₐ |
| 379 | E₁ₐE₅Eᵢᵥ | AlkLEᵥEᵥᵢ | E₄* | Eₐ |
| 380 | E_{1b}E₅Eᵢᵥ | AlkLEᵥEᵥᵢ | E₄* | Eₐ |
| 381 | E₁ₐEᵢᵥE₄ | AlkLEᵥEᵥᵢ | E₄* | Eₐ |
| 382 | E_{1b}EᵢᵥE₄ | AlkLEᵥEᵥᵢ | E₄* | Eₐ |
| 383 | E₁ₐE₅EᵢᵥE₄ | AlkLEᵥEᵥᵢ | E₄* | Eₐ |
| 384 | E_{1b}E₅EᵢᵥE₄ | AlkLEᵥEᵥᵢ | E₄* | Eₐ |
| 385 | E₁ₐ | EᵥEᵥᵢ | | E_{b} |
| 386 | E_{1b} | EᵥEᵥᵢ | | E_{b} |
| 387 | E₁ₐE₅ | EᵥEᵥᵢ | | E_{b} |
| 388 | E_{1b}E₅ | EᵥEᵥᵢ | | E_{b} |
| 389 | E₁ₐEᵢ | EᵥEᵥᵢ | | E_{b} |
| 390 | E_{1b}Eᵢ | EᵥEᵥᵢ | | E_{b} |
| 391 | E₁ₐEᵢᵢ | EᵥEᵥᵢ | | E_{b} |
| 392 | E_{1b}Eᵢᵢ | EᵥEᵥᵢ | | E_{b} |
| 393 | E₁ₐEᵢᵢE_{iib} | EᵥEᵥᵢ | | E_{b} |
| 394 | E_{1b}EᵢᵢE_{iib} | EᵥEᵥᵢ | | E_{b} |
| 395 | E₁ₐE₅Eᵢ | EᵥEᵥᵢ | | E_{b} |
| 396 | E_{1b}E₅Eᵢ | EᵥEᵥᵢ | | E_{b} |
| 397 | E₁ₐE₅Eᵢᵢ | EᵥEᵥᵢ | | E_{b} |
| 398 | E_{1b}E₅Eᵢᵢ | EᵥEᵥᵢ | | E_{b} |
| 399 | E₁ₐE₅EᵢᵢE_{iib} | EᵥEᵥᵢ | | E_{b} |
| 400 | E_{1b}E₅EᵢᵢE_{iib} | EᵥEᵥᵢ | | E_{b} |
| 401 | E₁ₐE₄ | EᵥEᵥᵢ | | E_{b} |
| 402 | E_{1b}E₄ | EᵥEᵥᵢ | | E_{b} |
| 403 | E₁ₐE₅E₄ | EᵥEᵥᵢ | | E_{b} |
| 404 | E_{1b}E₅E₄ | EᵥEᵥᵢ | | E_{b} |
| 405 | E₁ₐEᵢE₄ | EᵥEᵥᵢ | | E_{b} |
| 406 | E_{1b}EᵢE₄ | EᵥEᵥᵢ | | E_{b} |
| 407 | E₁ₐEᵢᵢE₄ | EᵥEᵥᵢ | | E_{b} |
| 408 | E_{1b}EᵢᵢE₄ | EᵥEᵥᵢ | | E_{b} |
| 409 | E₁ₐEᵢᵢE_{iib}E₄ | EᵥEᵥᵢ | | E_{b} |
| 410 | E_{1b}EᵢᵢE_{iib}E₄ | EᵥEᵥᵢ | | E_{b} |
| 411 | E₁ₐE₅EᵢE₄ | EᵥEᵥᵢ | | E_{b} |
| 412 | E_{1b}E₅EᵢE₄ | EᵥEᵥᵢ | | E_{b} |
| 413 | E₁ₐE₅EᵢᵢE₄ | EᵥEᵥᵢ | | E_{b} |
| 414 | E_{1b}E₅EᵢᵢE₄ | EᵥEᵥᵢ | | E_{b} |
| 415 | E₁ₐE₅EᵢᵢE_{iib}E₄ | EᵥEᵥᵢ | | E_{b} |
| 416 | E_{1b}E₅EᵢᵢE_{iib}E₄ | EᵥEᵥᵢ | | E_{b} |
| 417 | E₁ₐEᵢᵢᵢ | EᵥEᵥᵢ | | E_{b} |
| 418 | E_{1b}Eᵢᵢᵢ | EᵥEᵥᵢ | | E_{b} |
| 419 | E₁ₐE₅Eᵢᵢᵢ | EᵥEᵥᵢ | | E_{b} |
| 420 | E_{1b}E₅Eᵢᵢᵢ | EᵥEᵥᵢ | | E_{b} |
| 421 | E₁ₐEᵢᵢᵢE₄ | EᵥEᵥᵢ | | E_{b} |
| 422 | E_{1b}EᵢᵢᵢE₄ | EᵥEᵥᵢ | | E_{b} |
| 423 | E₁ₐE₅EᵢᵢᵢE₄ | EᵥEᵥᵢ | | E_{b} |
| 424 | E_{1b}E₅EᵢᵢᵢE₄ | EᵥEᵥᵢ | | E_{b} |
| 425 | E₁ₐEᵢᵥ | EᵥEᵥᵢ | | E_{b} |
| 426 | E_{1b}Eᵢᵥ | EᵥEᵥᵢ | | E_{b} |
| 427 | E₁ₐE₅Eᵢᵥ | EᵥEᵥᵢ | | E_{b} |
| 428 | E_{1b}E₅Eᵢᵥ | EᵥEᵥᵢ | | E_{b} |
| 429 | E₁ₐEᵢᵥE₄ | EᵥEᵥᵢ | | E_{b} |
| 430 | E_{1b}EᵢᵥE₄ | EᵥEᵥᵢ | | E_{b} |
| 431 | E₁ₐE₅EᵢᵥE₄ | EᵥEᵥᵢ | | E_{b} |
| 432 | E_{1b}E₅EᵢᵥE₄ | EᵥEᵥᵢ | | E_{b} |
| 433 | E₁ₐ | EᵥEᵥᵢ | E₄* | E_{b} |
| 434 | E_{1b} | EᵥEᵥᵢ | E₄* | E_{b} |
| 435 | E₁ₐE₅ | EᵥEᵥᵢ | E₄* | E_{b} |
| 436 | E_{1b}E₅ | EᵥEᵥᵢ | E₄* | E_{b} |
| 437 | E₁ₐEᵢ | EᵥEᵥᵢ | E₄* | E_{b} |
| 438 | E_{1b}Eᵢ | EᵥEᵥᵢ | E₄* | E_{b} |
| 439 | E₁ₐEᵢᵢ | EᵥEᵥᵢ | E₄* | E_{b} |
| 440 | E_{1b}Eᵢᵢ | EᵥEᵥᵢ | E₄* | E_{b} |
| 441 | E₁ₐEᵢᵢE_{iib} | EᵥEᵥᵢ | E₄* | E_{b} |
| 442 | E_{1b}EᵢᵢE_{iib} | EᵥEᵥᵢ | E₄* | E_{b} |
| 443 | E₁ₐE₅Eᵢ | EᵥEᵥᵢ | E₄* | E_{b} |
| 444 | E_{1b}E₅Eᵢ | EᵥEᵥᵢ | E₄* | E_{b} |
| 445 | E₁ₐE₅Eᵢᵢ | EᵥEᵥᵢ | E₄* | E_{b} |
| 446 | E_{1b}E₅Eᵢᵢ | EᵥEᵥᵢ | E₄* | E_{b} |
| 447 | E₁ₐE₅EᵢᵢE_{iib} | EᵥEᵥᵢ | E₄* | E_{b} |
| 448 | E_{1b}E₅EᵢᵢE_{iib} | EᵥEᵥᵢ | E₄* | E_{b} |
| 449 | E₁ₐE₄ | EᵥEᵥᵢ | E₄* | E_{b} |
| 450 | E_{1b}E₄ | EᵥEᵥᵢ | E₄* | E_{b} |
| 451 | E₁ₐE₅E₄ | EᵥEᵥᵢ | E₄* | E_{b} |
| 452 | E_{1b}E₅E₄ | EᵥEᵥᵢ | E₄* | E_{b} |
| 453 | E₁ₐEᵢE₄ | EᵥEᵥᵢ | E₄* | E_{b} |
| 454 | E_{1b}EᵢE₄ | EᵥEᵥᵢ | E₄* | E_{b} |
| 455 | E₁ₐEᵢᵢE₄ | EᵥEᵥᵢ | E₄* | E_{b} |
| 456 | E_{1b}EᵢᵢE₄ | EᵥEᵥᵢ | E₄* | E_{b} |
| 457 | E₁ₐEᵢᵢE_{iib}E₄ | EᵥEᵥᵢ | E₄* | E_{b} |
| 458 | E_{1b}EᵢᵢE_{iib}E₄ | EᵥEᵥᵢ | E₄* | E_{b} |
| 459 | E₁ₐE₅EᵢE₄ | EᵥEᵥᵢ | E₄* | E_{b} |
| 460 | E_{1b}E₅EᵢE₄ | EᵥEᵥᵢ | E₄* | E_{b} |
| 461 | E₁ₐE₅EᵢᵢE₄ | EᵥEᵥᵢ | E₄* | E_{b} |
| 462 | E_{1b}E₅EᵢᵢE₄ | EᵥEᵥᵢ | E₄* | E_{b} |
| 463 | E₁ₐE₅EᵢᵢE_{iib}E₄ | EᵥEᵥᵢ | E₄* | E_{b} |
| 464 | E_{1b}E₅EᵢᵢE_{iib}E₄ | EᵥEᵥᵢ | E₄* | E_{b} |
| 465 | E₁ₐEᵢᵢᵢ | EᵥEᵥᵢ | E₄* | E_{b} |
| 466 | E_{1b}Eᵢᵢᵢ | EᵥEᵥᵢ | E₄* | E_{b} |
| 467 | E₁ₐE₅Eᵢᵢᵢ | EᵥEᵥᵢ | E₄* | E_{b} |
| 468 | E_{1b}E₅Eᵢᵢᵢ | EᵥEᵥᵢ | E₄* | E_{b} |
| 469 | E₁ₐEᵢᵢᵢE₄ | EᵥEᵥᵢ | E₄* | E_{b} |
| 470 | E_{1b}EᵢᵢᵢE₄ | EᵥEᵥᵢ | E₄* | E_{b} |
| 471 | E₁ₐE₅EᵢᵢᵢE₄ | EᵥEᵥᵢ | E₄* | E_{b} |
| 472 | E_{1b}E₅EᵢᵢᵢE₄ | EᵥEᵥᵢ | E₄* | E_{b} |
| 473 | E₁ₐEᵢᵥ | EᵥEᵥᵢ | E₄* | E_{b} |
| 474 | E_{1b}Eᵢᵥ | EᵥEᵥᵢ | E₄* | E_{b} |
| 475 | E₁ₐE₅Eᵢᵥ | EᵥEᵥᵢ | E₄* | E_{b} |
| 476 | E_{1b}E₅Eᵢᵥ | EᵥEᵥᵢ | E₄* | E_{b} |
| 477 | E₁ₐEᵢᵥE₄ | EᵥEᵥᵢ | E₄* | E_{b} |
| 478 | E_{1b}EᵢᵥE₄ | EᵥEᵥᵢ | E₄* | E_{b} |
| 479 | E₁ₐE₅EᵢᵥE₄ | EᵥEᵥᵢ | E₄* | E_{b} |
| 480 | E_{1b}E₅EᵢᵥE₄ | EᵥEᵥᵢ | E₄* | E_{b} |
| 481 | E₁ₐ | AlkLEᵥEᵥᵢ | | E_{b} |
| 482 | E_{1b} | AlkLEᵥEᵥᵢ | | E_{b} |
| 483 | E₁ₐE₅ | AlkLEᵥEᵥᵢ | | E_{b} |
| 484 | E_{1b}E₅ | AlkLEᵥEᵥᵢ | | E_{b} |
| 485 | E₁ₐEᵢ | AlkLEᵥEᵥᵢ | | E_{b} |
| 486 | E_{1b}Eᵢ | AlkLEᵥEᵥᵢ | | E_{b} |
| 487 | E₁ₐEᵢᵢ | AlkLEᵥEᵥᵢ | | E_{b} |
| 488 | E_{1b}Eᵢᵢ | AlkLEᵥEᵥᵢ | | E_{b} |
| 489 | E₁ₐEᵢᵢE_{iib} | AlkLEᵥEᵥᵢ | | E_{b} |
| 490 | E_{1b}EᵢᵢE_{iib} | AlkLEᵥEᵥᵢ | | E_{b} |
| 491 | E₁ₐE₅Eᵢ | AlkLEᵥEᵥᵢ | | E_{b} |
| 492 | E_{1b}E₅Eᵢ | AlkLEᵥEᵥᵢ | | E_{b} |
| 493 | E₁ₐE₅Eᵢᵢ | AlkLEᵥEᵥᵢ | | E_{b} |
| 494 | E_{1b}E₅Eᵢᵢ | AlkLEᵥEᵥᵢ | | E_{b} |
| 495 | E₁ₐE₅EᵢᵢE_{iib} | AlkLEᵥEᵥᵢ | | E_{b} |
| 496 | E_{1b}E₅EᵢᵢE_{iib} | AlkLEᵥEᵥᵢ | | E_{b} |
| 497 | E₁ₐE₄ | AlkLEᵥEᵥᵢ | | E_{b} |
| 498 | E_{1b}E₄ | AlkLEᵥEᵥᵢ | | E_{b} |
| 499 | E₁ₐE₅E₄ | AlkLEᵥEᵥᵢ | | E_{b} |
| 500 | E_{1b}E₅E₄ | AlkLEᵥEᵥᵢ | | E_{b} |
| 501 | E₁ₐEᵢE₄ | AlkLEᵥEᵥᵢ | | E_{b} |
| 502 | E_{1b}EᵢE₄ | AlkLEᵥEᵥᵢ | | E_{b} |
| 503 | E₁ₐEᵢᵢE₄ | AlkLEᵥEᵥᵢ | | E_{b} |
| 504 | E_{1b}EᵢᵢE₄ | AlkLEᵥEᵥᵢ | | E_{b} |
| 505 | E₁ₐEᵢᵢE_{iib}E₄ | AlkLEᵥEᵥᵢ | | E_{b} |
| 506 | E_{1b}EᵢᵢE_{iib}E₄ | AlkLEᵥEᵥᵢ | | E_{b} |
| 507 | E₁ₐE₅EᵢE₄ | AlkLEᵥEᵥᵢ | | E_{b} |
| 508 | E_{1b}E₅EᵢE₄ | AlkLEᵥEᵥᵢ | | E_{b} |
| 509 | E₁ₐE₅EᵢᵢE₄ | AlkLEᵥEᵥᵢ | | E_{b} |
| 510 | E_{1b}E₅EᵢᵢE₄ | AlkLEᵥEᵥᵢ | | E_{b} |
| 511 | E₁ₐE₅EᵢᵢE_{iib}E₄ | AlkLEᵥEᵥᵢ | | E_{b} |
| 512 | E_{1b}E₅EᵢᵢE_{iib}E₄ | AlkLEᵥEᵥᵢ | | E_{b} |
| 513 | E₁ₐEᵢᵢᵢ | AlkLEᵥEᵥᵢ | | E_{b} |
| 514 | E_{1b}Eᵢᵢᵢ | AlkLEᵥEᵥᵢ | | E_{b} |
| 515 | E₁ₐE₅Eᵢᵢᵢ | AlkLEᵥEᵥᵢ | | E_{b} |
| 516 | E_{1b}E₅Eᵢᵢᵢ | AlkLEᵥEᵥᵢ | | E_{b} |
| 517 | E₁ₐEᵢᵢᵢE₄ | AlkLEᵥEᵥᵢ | | E_{b} |
| 518 | E_{1b}EᵢᵢᵢE₄ | AlkLEᵥEᵥᵢ | | E_{b} |
| 519 | E₁ₐE₅EᵢᵢᵢE₄ | AlkLEᵥEᵥᵢ | | E_{b} |
| 520 | E_{1b}E₅EᵢᵢᵢE₄ | AlkLEᵥEᵥᵢ | | E_{b} |
| 521 | E₁ₐEᵢᵥ | AlkLEᵥEᵥᵢ | | E_{b} |
| 522 | E_{1b}Eᵢᵥ | AlkLEᵥEᵥᵢ | | E_{b} |
| 523 | E₁ₐE₅Eᵢᵥ | AlkLEᵥEᵥᵢ | | E_{b} |
| 524 | E_{1b}E₅Eᵢᵥ | AlkLEᵥEᵥᵢ | | E_{b} |
| 525 | E₁ₐEᵢᵥE₄ | AlkLEᵥEᵥᵢ | | E_{b} |
| 526 | E_{1b}EᵢᵥE₄ | AlkLEᵥEᵥᵢ | | E_{b} |
| 527 | E₁ₐE₅EᵢᵥE₄ | AlkLEᵥEᵥᵢ | | E_{b} |
| 528 | E_{1b}E₅EᵢᵥE₄ | AlkLEᵥEᵥᵢ | | E_{b} |
| 529 | E₁ₐ | AlkLEᵥEᵥᵢ | E₄* | E_{b} |
| 530 | E_{1b} | AlkLEᵥEᵥᵢ | E₄* | E_{b} |
| 531 | E₁ₐE₅ | AlkLEᵥEᵥᵢ | E₄* | E_{b} |
| 532 | E_{1b}E₅ | AlkLEᵥEᵥᵢ | E₄* | E_{b} |
| 533 | E₁ₐEᵢ | AlkLEᵥEᵥᵢ | E₄* | E_{b} |
| 534 | E_{1b}Eᵢ | AlkLEᵥEᵥᵢ | E₄* | E_{b} |
| 535 | E₁ₐEᵢᵢ | AlkLEᵥEᵥᵢ | E₄* | E_{b} |
| 536 | E_{1b}Eᵢᵢ | AlkLEᵥEᵥᵢ | E₄* | E_{b} |
| 537 | E₁ₐEᵢᵢE_{iib} | AlkLEᵥEᵥᵢ | E₄* | E_{b} |
| 538 | E_{1b}EᵢᵢE_{iib} | AlkLEᵥEᵥᵢ | E₄* | E_{b} |
| 539 | E₁ₐE₅Eᵢ | AlkLEᵥEᵥᵢ | E₄* | E_{b} |
| 540 | E_{1b}E₅Eᵢ | AlkLEᵥEᵥᵢ | E₄* | E_{b} |
| 541 | E₁ₐE₅Eᵢᵢ | AlkLEᵥEᵥᵢ | E₄* | E_{b} |
| 542 | E_{1b}E₅Eᵢᵢ | AlkLEᵥEᵥᵢ | E₄* | E_{b} |
| 543 | E₁ₐE₅EᵢᵢE_{iib} | AlkLEᵥEᵥᵢ | E₄* | E_{b} |
| 544 | E_{1b}E₅EᵢᵢE_{iib} | AlkLEᵥEᵥᵢ | E₄* | E_{b} |
| 545 | E₁ₐE₄ | AlkLEᵥEᵥᵢ | E₄* | E_{b} |
| 546 | E_{1b}E₄ | AlkLEᵥEᵥᵢ | E₄* | E_{b} |
| 547 | E₁ₐE₅E₄ | AlkLEᵥEᵥᵢ | E₄* | E_{b} |
| 548 | E_{1b}E₅E₄ | AlkLEᵥEᵥᵢ | E₄* | E_{b} |
| 549 | E₁ₐEᵢE₄ | AlkLEᵥEᵥᵢ | E₄* | E_{b} |
| 550 | E_{1b}EᵢE₄ | AlkLEᵥEᵥᵢ | E₄* | E_{b} |
| 551 | E₁ₐEᵢᵢE₄ | AlkLEᵥEᵥᵢ | E₄* | E_{b} |
| 552 | E_{1b}EᵢᵢE₄ | AlkLEᵥEᵥᵢ | E₄* | E_{b} |
| 553 | E₁ₐEᵢᵢE_{iib}E₄ | AlkLEᵥEᵥᵢ | E₄* | E_{b} |
| 554 | E_{1b}EᵢᵢE_{iib}E₄ | AlkLEᵥEᵥᵢ | E₄* | E_{b} |
| 555 | E₁ₐE₅EᵢE₄ | AlkLEᵥEᵥᵢ | E₄* | E_{b} |
| 556 | E_{1b}E₅EᵢE₄ | AlkLEᵥEᵥᵢ | E₄* | E_{b} |
| 557 | E₁ₐE₅EᵢᵢE₄ | AlkLEᵥEᵥᵢ | E₄* | E_{b} |
| 558 | E_{1b}E₅EᵢᵢE₄ | AlkLEᵥEᵥᵢ | E₄* | E_{b} |
| 559 | E₁ₐE₅EᵢᵢE_{iib}E₄ | AlkLEᵥEᵥᵢ | E₄* | E_{b} |
| 560 | E_{1b}E₅EᵢᵢE_{iib}E₄ | AlkLEᵥEᵥᵢ | E₄* | E_{b} |
| 561 | E₁ₐEᵢᵢᵢ | AlkLEᵥEᵥᵢ | E₄* | E_{b} |
| 562 | E_{1b}Eᵢᵢᵢ | AlkLEᵥEᵥᵢ | E₄* | E_{b} |
| 563 | E₁ₐE₅Eᵢᵢᵢ | AlkLEᵥEᵥᵢ | E₄* | E_{b} |
| 564 | E_{1b}E₅Eᵢᵢᵢ | AlkLEᵥEᵥᵢ | E₄* | E_{b} |
| 565 | E₁ₐEᵢᵢᵢE₄ | AlkLEᵥEᵥᵢ | E₄* | E_{b} |
| 566 | E_{1b}EᵢᵢᵢE₄ | AlkLEᵥEᵥᵢ | E₄* | E_{b} |
| 567 | E₁ₐE₅EᵢᵢᵢE₄ | AlkLEᵥEᵥᵢ | E₄* | E_{b} |
| 568 | E_{1b}E₅EᵢᵢᵢE₄ | AlkLEᵥEᵥᵢ | E₄* | E_{b} |
| 569 | E₁ₐEᵢᵥ | AlkLEᵥEᵥᵢ | E₄* | E_{b} |
| 570 | E_{1b}Eᵢᵥ | AlkLEᵥEᵥᵢ | E₄* | E_{b} |
| 571 | E₁ₐE₅Eᵢᵥ | AlkLEᵥEᵥᵢ | E₄* | E_{b} |
| 572 | E_{1b}E₅Eᵢᵥ | AlkLEᵥEᵥᵢ | E₄* | E_{b} |
| 573 | E₁ₐEᵢᵥE₄ | AlkLEᵥEᵥᵢ | E₄* | E_{b} |
| 574 | E_{1b}EᵢᵥE₄ | AlkLEᵥEᵥᵢ | E₄* | E_{b} |
| 575 | E₁ₐE₅EᵢᵥE₄ | AlkLEᵥEᵥᵢ | E₄* | E_{b} |
| 576 | E_{1b}E₅EᵢᵥE₄ | AlkLEᵥEᵥᵢ | E₄* | E_{b} |
| 577 | E₁ₐ | EᵥEᵥᵢ | | E_{d} |
| 578 | E_{1b} | EᵥEᵥᵢ | | E_{d} |
| 579 | E₁ₐE₅ | EᵥEᵥᵢ | | E_{d} |
| 580 | E_{1b}E₅ | EᵥEᵥᵢ | | E_{d} |
| 581 | E₁ₐEᵢ | EᵥEᵥᵢ | | E_{d} |
| 582 | E_{1b}Eᵢ | EᵥEᵥᵢ | | E_{d} |
| 583 | E₁ₐEᵢᵢ | EᵥEᵥᵢ | | E_{d} |
| 584 | E_{1b}Eᵢᵢ | EᵥEᵥᵢ | | E_{d} |
| 585 | E₁ₐEᵢᵢE_{iib} | EᵥEᵥᵢ | | E_{d} |
| 586 | E_{1b}EᵢᵢE_{iib} | EᵥEᵥᵢ | | E_{d} |
| 587 | E₁ₐE₅Eᵢ | EᵥEᵥᵢ | | E_{d} |
| 588 | E_{1b}E₅Eᵢ | EᵥEᵥᵢ | | E_{d} |
| 589 | E₁ₐE₅Eᵢᵢ | EᵥEᵥᵢ | | E_{d} |
| 590 | E_{1b}E₅Eᵢᵢ | EᵥEᵥᵢ | | E_{d} |
| 591 | E₁ₐE₅EᵢᵢE_{iib} | EᵥEᵥᵢ | | E_{d} |
| 592 | E_{1b}E₅EᵢᵢE_{iib} | EᵥEᵥᵢ | | E_{d} |
| 593 | E₁ₐE₄ | EᵥEᵥᵢ | | E_{d} |
| 594 | E_{1b}E₄ | EᵥEᵥᵢ | | E_{d} |
| 595 | E₁ₐE₅E₄ | EᵥEᵥᵢ | | E_{d} |
| 596 | E_{1b}E₅E₄ | EᵥEᵥᵢ | | E_{d} |
| 597 | E₁ₐEᵢE₄ | EᵥEᵥᵢ | | E_{d} |
| 598 | E_{1b}EᵢE₄ | EᵥEᵥᵢ | | E_{d} |
| 599 | E₁ₐEᵢᵢE₄ | EᵥEᵥᵢ | | E_{d} |
| 600 | E_{1b}EᵢᵢE₄ | EᵥEᵥᵢ | | E_{d} |
| 601 | E₁ₐEᵢᵢE_{iib}E₄ | EᵥEᵥᵢ | | E_{d} |
| 602 | E_{1b}EᵢᵢE_{iib}E₄ | EᵥEᵥᵢ | | E_{d} |
| 603 | E₁ₐE₅EᵢE₄ | EᵥEᵥᵢ | | E_{d} |
| 604 | E_{1b}E₅EᵢE₄ | EᵥEᵥᵢ | | E_{d} |
| 605 | E₁ₐE₅EᵢᵢE₄ | EᵥEᵥᵢ | | E_{d} |
| 606 | E_{1b}E₅EᵢᵢE₄ | EᵥEᵥᵢ | | E_{d} |
| 607 | E₁ₐE₅EᵢᵢE_{iib}E₄ | EᵥEᵥᵢ | | E_{d} |
| 608 | E_{1b}E₅EᵢᵢE_{iib}E₄ | EᵥEᵥᵢ | | E_{d} |
| 609 | E₁ₐEᵢᵢᵢ | EᵥEᵥᵢ | | E_{d} |
| 610 | E_{1b}Eᵢᵢᵢ | EᵥEᵥᵢ | | E_{d} |
| 611 | E₁ₐE₅Eᵢᵢᵢ | EᵥEᵥᵢ | | E_{d} |
| 612 | E_{1b}E₅Eᵢᵢᵢ | EᵥEᵥᵢ | | E_{d} |
| 613 | E₁ₐEᵢᵢᵢE₄ | EᵥEᵥᵢ | | E_{d} |
| 614 | E_{1b}EᵢᵢᵢE₄ | EᵥEᵥᵢ | | E_{d} |
| 615 | E₁ₐE₅EᵢᵢᵢE₄ | EᵥEᵥᵢ | | E_{d} |
| 616 | E_{1b}E₅EᵢᵢᵢE₄ | EᵥEᵥᵢ | | E_{d} |
| 617 | E₁ₐEᵢᵥ | EᵥEᵥᵢ | | E_{d} |
| 618 | E_{1b}Eᵢᵥ | EᵥEᵥᵢ | | E_{d} |
| 619 | E₁ₐE₅Eᵢᵥ | EᵥEᵥᵢ | | E_{d} |
| 620 | E_{1b}E₅Eᵢᵥ | EᵥEᵥᵢ | | E_{d} |
| 621 | E₁ₐEᵢᵥE₄ | EᵥEᵥᵢ | | E_{d} |
| 622 | E_{1b}EᵢᵥE₄ | EᵥEᵥᵢ | | E_{d} |
| 623 | E₁ₐE₅EᵢᵥE₄ | EᵥEᵥᵢ | | E_{d} |
| 624 | E_{1b}E₅EᵢᵥE₄ | EᵥEᵥᵢ | | E_{d} |
| 625 | E₁ₐ | EᵥEᵥᵢ | E₄* | E_{d} |
| 626 | E_{1b} | EᵥEᵥᵢ | E₄* | E_{d} |
| 627 | E₁ₐE₅ | EᵥEᵥᵢ | E₄* | E_{d} |
| 628 | E_{1b}E₅ | EᵥEᵥᵢ | E₄* | E_{d} |
| 629 | E₁ₐEᵢ | EᵥEᵥᵢ | E₄* | E_{d} |
| 630 | E_{1b}Eᵢ | EᵥEᵥᵢ | E₄* | E_{d} |
| 631 | E₁ₐEᵢᵢ | EᵥEᵥᵢ | E₄* | E_{d} |
| 632 | E_{1b}Eᵢᵢ | EᵥEᵥᵢ | E₄* | E_{d} |
| 633 | E₁ₐEᵢᵢE_{iib} | EᵥEᵥᵢ | E₄* | E_{d} |
| 634 | E_{1b}EᵢᵢE_{iib} | EᵥEᵥᵢ | E₄* | E_{d} |
| 635 | E₁ₐE₅Eᵢ | EᵥEᵥᵢ | E₄* | E_{d} |
| 636 | E_{1b}E₅Eᵢ | EᵥEᵥᵢ | E₄* | E_{d} |
| 637 | E₁ₐE₅Eᵢᵢ | EᵥEᵥᵢ | E₄* | E_{d} |
| 638 | E_{1b}E₅Eᵢᵢ | EᵥEᵥᵢ | E₄* | E_{d} |
| 639 | E₁ₐE₅EᵢᵢE_{iib} | EᵥEᵥᵢ | E₄* | E_{d} |
| 640 | E_{1b}E₅EᵢᵢE_{iib} | EᵥEᵥᵢ | E₄* | E_{d} |
| 641 | E₁ₐE₄ | EᵥEᵥᵢ | E₄* | E_{d} |
| 642 | E_{1b}E₄ | EᵥEᵥᵢ | E₄* | E_{d} |
| 643 | E₁ₐE₅E₄ | EᵥEᵥᵢ | E₄* | E_{d} |
| 644 | E_{1b}E₅E₄ | EᵥEᵥᵢ | E₄* | E_{d} |
| 645 | E₁ₐEᵢE₄ | EᵥEᵥᵢ | E₄* | E_{d} |
| 646 | E_{1b}EᵢE₄ | EᵥEᵥᵢ | E₄* | E_{d} |
| 647 | E₁ₐEᵢᵢE₄ | EᵥEᵥᵢ | E₄* | E_{d} |
| 648 | E_{1b}EᵢᵢE₄ | EᵥEᵥᵢ | E₄* | E_{d} |
| 649 | E₁ₐEᵢᵢE_{iib}E₄ | EᵥEᵥᵢ | E₄* | E_{d} |
| 650 | E_{1b}EᵢᵢE_{iib}E₄ | EᵥEᵥᵢ | E₄* | E_{d} |
| 651 | E₁ₐE₅EᵢE₄ | EᵥEᵥᵢ | E₄* | E_{d} |
| 652 | E_{1b}E₅EᵢE₄ | EᵥEᵥᵢ | E₄* | E_{d} |
| 653 | E₁ₐE₅EᵢᵢE₄ | EᵥEᵥᵢ | E₄* | E_{d} |
| 654 | E_{1b}E₅EᵢᵢE₄ | EᵥEᵥᵢ | E₄* | E_{d} |
| 655 | E₁ₐE₅EᵢᵢE_{iib}E₄ | EᵥEᵥᵢ | E₄* | E_{d} |
| 656 | E_{1b}E₅EᵢᵢE_{iib}E₄ | EᵥEᵥᵢ | E₄* | E_{d} |
| 657 | E₁ₐEᵢᵢᵢ | EᵥEᵥᵢ | E₄* | E_{d} |
| 658 | E_{1b}Eᵢᵢᵢ | EᵥEᵥᵢ | E₄* | E_{d} |
| 659 | E₁ₐE₅Eᵢᵢᵢ | EᵥEᵥᵢ | E₄* | E_{d} |
| 660 | E_{1b}E₅Eᵢᵢᵢ | EᵥEᵥᵢ | E₄* | E_{d} |
| 661 | E₁ₐEᵢᵢᵢE₄ | EᵥEᵥᵢ | E₄* | E_{d} |
| 662 | E_{1b}EᵢᵢᵢE₄ | EᵥEᵥᵢ | E₄* | E_{d} |
| 663 | E₁ₐE₅EᵢᵢᵢE₄ | EᵥEᵥᵢ | E₄* | E_{d} |
| 664 | E_{1b}E₅EᵢᵢᵢE₄ | EᵥEᵥᵢ | E₄* | E_{d} |
| 665 | E₁ₐEᵢᵥ | EᵥEᵥᵢ | E₄* | E_{d} |
| 666 | E_{1b}Eᵢᵥ | EᵥEᵥᵢ | E₄* | E_{d} |
| 667 | E₁ₐE₅Eᵢᵥ | EᵥEᵥᵢ | E₄* | E_{d} |
| 668 | E_{1b}E₅Eᵢᵥ | EᵥEᵥᵢ | E₄* | E_{d} |
| 669 | E₁ₐEᵢᵥE₄ | EᵥEᵥᵢ | E₄* | E_{d} |
| 670 | E_{1b}EᵢᵥE₄ | EᵥEᵥᵢ | E₄* | E_{d} |
| 671 | E₁ₐE₅EᵢᵥE₄ | EᵥEᵥᵢ | E₄* | E_{d} |
| 672 | E_{1b}E₅EᵢᵥE₄ | EᵥEᵥᵢ | E₄* | E_{d} |
| 673 | E₁ₐ | AlkLEᵥEᵥᵢ | | E_{d} |
| 674 | E_{1b} | AlkLEᵥEᵥᵢ | | E_{d} |
| 675 | E₁ₐE₅ | AlkLEᵥEᵥᵢ | | E_{d} |
| 676 | E_{1b}E₅ | AlkLEᵥEᵥᵢ | | E_{d} |
| 677 | E₁ₐEᵢ | AlkLEᵥEᵥᵢ | | E_{d} |
| 678 | E_{1b}Eᵢ | AlkLEᵥEᵥᵢ | | E_{d} |
| 679 | E₁ₐEᵢᵢ | AlkLEᵥEᵥᵢ | | E_{d} |
| 680 | E_{1b}Eᵢᵢ | AlkLEᵥEᵥᵢ | | E_{d} |
| 681 | E₁ₐEᵢᵢE_{iib} | AlkLEᵥEᵥᵢ | | E_{d} |
| 682 | E_{1b}EᵢᵢE_{iib} | AlkLEᵥEᵥᵢ | | E_{d} |
| 683 | E₁ₐE₅Eᵢ | AlkLEᵥEᵥᵢ | | E_{d} |
| 684 | E_{1b}E₅Eᵢ | AlkLEᵥEᵥᵢ | | E_{d} |
| 685 | E₁ₐE₅Eᵢᵢ | AlkLEᵥEᵥᵢ | | E_{d} |
| 686 | E_{1b}E₅Eᵢᵢ | AlkLEᵥEᵥᵢ | | E_{d} |
| 687 | E₁ₐE₅EᵢᵢE_{iib} | AlkLEᵥEᵥᵢ | | E_{d} |
| 688 | E_{1b}E₅EᵢᵢE_{iib} | AlkLEᵥEᵥᵢ | | E_{d} |
| 689 | E₁ₐE₄ | AlkLEᵥEᵥᵢ | | E_{d} |
| 690 | E_{1b}E₄ | AlkLEᵥEᵥᵢ | | E_{d} |
| 691 | E₁ₐE₅E₄ | AlkLEᵥEᵥᵢ | | E_{d} |
| 692 | E_{1b}E₅E₄ | AlkLEᵥEᵥᵢ | | E_{d} |
| 693 | E₁ₐEᵢE₄ | AlkLEᵥEᵥᵢ | | E_{d} |
| 694 | E_{1b}EᵢE₄ | AlkLEᵥEᵥᵢ | | E_{d} |
| 695 | E₁ₐEᵢᵢE₄ | AlkLEᵥEᵥᵢ | | E_{d} |
| 696 | E_{1b}EᵢᵢE₄ | AlkLEᵥEᵥᵢ | | E_{d} |
| 697 | E₁ₐEᵢᵢE_{iib}E₄ | AlkLEᵥEᵥᵢ | | E_{d} |
| 698 | E_{1b}EᵢᵢE_{iib}E₄ | AlkLEᵥEᵥᵢ | | E_{d} |
| 699 | E₁ₐE₅EᵢE₄ | AlkLEᵥEᵥᵢ | | E_{d} |
| 700 | E_{1b}E₅EᵢE₄ | AlkLEᵥEᵥᵢ | | E_{d} |
| 701 | E₁ₐE₅EᵢᵢE₄ | AlkLEᵥEᵥᵢ | | E_{d} |
| 702 | E_{1b}E₅EᵢᵢE₄ | AlkLEᵥEᵥᵢ | | E_{d} |
| 703 | E₁ₐE₅EᵢᵢE_{iib}E₄ | AlkLEᵥEᵥᵢ | | E_{d} |
| 704 | E_{1b}E₅EᵢᵢE_{iib}E₄ | AlkLEᵥEᵥᵢ | | E_{d} |
| 705 | E₁ₐEᵢᵢᵢ | AlkLEᵥEᵥᵢ | | E_{d} |
| 706 | E_{1b}Eᵢᵢᵢ | AlkLEᵥEᵥᵢ | | E_{d} |
| 707 | E₁ₐE₅Eᵢᵢᵢ | AlkLEᵥEᵥᵢ | | E_{d} |
| 708 | E_{1b}E₅Eᵢᵢᵢ | AlkLEᵥEᵥᵢ | | E_{d} |
| 709 | E₁ₐEᵢᵢᵢE₄ | AlkLEᵥEᵥᵢ | | E_{d} |
| 710 | E_{1b}EᵢᵢᵢE₄ | AlkLEᵥEᵥᵢ | | E_{d} |
| 711 | E₁ₐE₅EᵢᵢᵢE₄ | AlkLEᵥEᵥᵢ | | E_{d} |
| 712 | E_{1b}E₅EᵢᵢᵢE₄ | AlkLEᵥEᵥᵢ | | E_{d} |
| 713 | E₁ₐEᵢᵥ | AlkLEᵥEᵥᵢ | | E_{d} |
| 714 | E_{1b}Eᵢᵥ | AlkLEᵥEᵥᵢ | | E_{d} |
| 715 | E₁ₐE₅Eᵢᵥ | AlkLEᵥEᵥᵢ | | E_{d} |
| 716 | E_{1b}E₅Eᵢᵥ | AlkLEᵥEᵥᵢ | | E_{d} |
| 717 | E₁ₐEᵢᵥE₄ | AlkLEᵥEᵥᵢ | | E_{d} |
| 718 | E_{1b}EᵢᵥE₄ | AlkLEᵥEᵥᵢ | | E_{d} |
| 719 | E₁ₐE₅EᵢᵥE₄ | AlkLEᵥEᵥᵢ | | E_{d} |
| 720 | E_{1b}E₅EᵢᵥE₄ | AlkLEᵥEᵥᵢ | | E_{d} |
| 721 | E₁ₐ | AlkLEᵥEᵥᵢ | E₄* | E_{d} |
| 722 | E_{1b} | AlkLEᵥEᵥᵢ | E₄* | E_{d} |
| 723 | E₁ₐE₅ | AlkLEᵥEᵥᵢ | E₄* | E_{d} |
| 724 | E_{1b}E₅ | AlkLEᵥEᵥᵢ | E₄* | E_{d} |
| 725 | E₁ₐEᵢ | AlkLEᵥEᵥᵢ | E₄* | E_{d} |
| 726 | E_{1b}Eᵢ | AlkLEᵥEᵥᵢ | E₄* | E_{d} |
| 727 | E₁ₐEᵢᵢ | AlkLEᵥEᵥᵢ | E₄* | E_{d} |
| 728 | E_{1b}Eᵢᵢ | AlkLEᵥEᵥᵢ | E₄* | E_{d} |
| 729 | E₁ₐEᵢᵢE_{iib} | AlkLEᵥEᵥᵢ | E₄* | E_{d} |
| 730 | E_{1b}EᵢᵢE_{iib} | AlkLEᵥEᵥᵢ | E₄* | E_{d} |
| 731 | E₁ₐE₅Eᵢ | AlkLEᵥEᵥᵢ | E₄* | E_{d} |
| 732 | E_{1b}E₅Eᵢ | AlkLEᵥEᵥᵢ | E₄* | E_{d} |
| 733 | E₁ₐE₅Eᵢᵢ | AlkLEᵥEᵥᵢ | E₄* | E_{d} |
| 734 | E_{1b}E₅Eᵢᵢ | AlkLEᵥEᵥᵢ | E₄* | E_{d} |
| 735 | E₁ₐE₅EᵢᵢE_{iib} | AlkLEᵥEᵥᵢ | E₄* | E_{d} |
| 736 | E_{1b}E₅EᵢᵢE_{iib} | AlkLEᵥEᵥᵢ | E₄* | E_{d} |
| 737 | E₁ₐE₄ | AlkLEᵥEᵥᵢ | E₄* | E_{d} |
| 738 | E_{1b}E₄ | AlkLEᵥEᵥᵢ | E₄* | E_{d} |
| 739 | E₁ₐE₅E₄ | AlkLEᵥEᵥᵢ | E₄* | E_{d} |
| 740 | E_{1b}E₅E₄ | AlkLEᵥEᵥᵢ | E₄* | E_{d} |
| 741 | E₁ₐEᵢE₄ | AlkLEᵥEᵥᵢ | E₄* | E_{d} |
| 742 | E_{1b}EᵢE₄ | AlkLEᵥEᵥᵢ | E₄* | E_{d} |
| 743 | E₁ₐEᵢᵢE₄ | AlkLEᵥEᵥᵢ | E₄* | E_{d} |
| 744 | E_{1b}EᵢᵢE₄ | AlkLEᵥEᵥᵢ | E₄* | E_{d} |
| 745 | E₁ₐEᵢᵢE_{iib}E₄ | AlkLEᵥEᵥᵢ | E₄* | E_{d} |
| 746 | E_{1b}EᵢᵢE_{iib}E₄ | AlkLEᵥEᵥᵢ | E₄* | E_{d} |
| 747 | E₁ₐE₅EᵢE₄ | AlkLEᵥEᵥᵢ | E₄* | E_{d} |
| 748 | E_{1b}E₅EᵢE₄ | AlkLEᵥEᵥᵢ | E₄* | E_{d} |
| 749 | E₁ₐE₅EᵢᵢE₄ | AlkLEᵥEᵥᵢ | E₄* | E_{d} |
| 750 | E_{1b}E₅EᵢᵢE₄ | AlkLEᵥEᵥᵢ | E₄* | E_{d} |
| 751 | E₁ₐE₅EᵢᵢE_{iib}E₄ | AlkLEᵥEᵥᵢ | E₄* | E_{d} |
| 752 | E_{1b}E₅EᵢᵢE_{iib}E₄ | AlkLEᵥEᵥᵢ | E₄* | E_{d} |
| 753 | E₁ₐEᵢᵢᵢ | AlkLEᵥEᵥᵢ | E₄* | E_{d} |
| 754 | E_{1b}Eᵢᵢᵢ | AlkLEᵥEᵥᵢ | E₄* | E_{d} |
| 755 | E₁ₐE₅Eᵢᵢᵢ | AlkLEᵥEᵥᵢ | E₄* | E_{d} |
| 756 | E_{1b}E₅Eᵢᵢᵢ | AlkLEᵥEᵥᵢ | E₄* | E_{d} |
| 757 | E₁ₐEᵢᵢᵢE₄ | AlkLEᵥEᵥᵢ | E₄* | E_{d} |
| 758 | E_{1b}EᵢᵢᵢE₄ | AlkLEᵥEᵥᵢ | E₄* | E_{d} |
| 759 | E₁ₐE₅EᵢᵢᵢE₄ | AlkLEᵥEᵥᵢ | E₄* | E_{d} |
| 760 | E_{1b}E₅EᵢᵢᵢE₄ | AlkLEᵥEᵥᵢ | E₄* | E_{d} |
| 761 | E₁ₐEᵢᵥ | AlkLEᵥEᵥᵢ | E₄* | E_{d} |
| 762 | E_{1b}Eᵢᵥ | AlkLEᵥEᵥᵢ | E₄* | E_{d} |
| 763 | E₁ₐE₅Eᵢᵥ | AlkLEᵥEᵥᵢ | E₄* | E_{d} |
| 764 | E_{1b}E₅Eᵢᵥ | AlkLEᵥEᵥᵢ | E₄* | E_{d} |
| 765 | E₁ₐEᵢᵥE₄ | AlkLEᵥEᵥᵢ | E₄* | E_{d} |
| 766 | E_{1b}EᵢᵥE₄ | AlkLEᵥEᵥᵢ | E₄* | E_{d} |
| 767 | E₁ₐE₅EᵢᵥE₄ | AlkLEᵥEᵥᵢ | E₄* | E_{d} |
| 768 | E_{1b}E₅EᵢᵥE₄ | AlkLEᵥEᵥᵢ | E₄* | E_{d} |
| 769 | E₁ₐ | EᵥEᵥᵢ | | Eₑ |
| 770 | E_{1b} | EᵥEᵥᵢ | | Eₑ |
| 771 | E₁ₐE₅ | EᵥEᵥᵢ | | Eₑ |
| 772 | E_{1b}E₅ | EᵥEᵥᵢ | | Eₑ |
| 773 | E₁ₐEᵢ | EᵥEᵥᵢ | | Eₑ |
| 774 | E_{1b}Eᵢ | EᵥEᵥᵢ | | Eₑ |
| 775 | E₁ₐEᵢᵢ | EᵥEᵥᵢ | | Eₑ |
| 776 | E_{1b}Eᵢᵢ | EᵥEᵥᵢ | | Eₑ |
| 777 | E₁ₐEᵢᵢE_{iib} | EᵥEᵥᵢ | | Eₑ |
| 778 | E_{1b}EᵢᵢE_{iib} | EᵥEᵥᵢ | | Eₑ |
| 779 | E₁ₐE₅Eᵢ | EᵥEᵥᵢ | | Eₑ |
| 780 | E_{1b}E₅Eᵢ | EᵥEᵥᵢ | | Eₑ |
| 781 | E₁ₐE₅Eᵢᵢ | EᵥEᵥᵢ | | Eₑ |
| 782 | E_{1b}E₅Eᵢᵢ | EᵥEᵥᵢ | | Eₑ |
| 783 | E₁ₐE₅EᵢᵢE_{iib} | EᵥEᵥᵢ | | Eₑ |
| 784 | E_{1b}E₅EᵢᵢE_{iib} | EᵥEᵥᵢ | | Eₑ |
| 785 | E₁ₐE₄ | EᵥEᵥᵢ | | Eₑ |
| 786 | E_{1b}E₄ | EᵥEᵥᵢ | | Eₑ |
| 787 | E₁ₐE₅E₄ | EᵥEᵥᵢ | | Eₑ |
| 788 | E_{1b}E₅E₄ | EᵥEᵥᵢ | | Eₑ |
| 789 | E₁ₐEᵢE₄ | EᵥEᵥᵢ | | Eₑ |
| 790 | E_{1b}EᵢE₄ | EᵥEᵥᵢ | | Eₑ |
| 791 | E₁ₐEᵢᵢE₄ | EᵥEᵥᵢ | | Eₑ |
| 792 | E_{1b}EᵢᵢE₄ | EᵥEᵥᵢ | | Eₑ |
| 793 | E₁ₐEᵢᵢE_{iib}E₄ | EᵥEᵥᵢ | | Eₑ |
| 794 | E_{1b}EᵢᵢE_{iib}E₄ | EᵥEᵥᵢ | | Eₑ |
| 795 | E₁ₐE₅EᵢE₄ | EᵥEᵥᵢ | | Eₑ |
| 796 | E_{1b}E₅EᵢE₄ | EᵥEᵥᵢ | | Eₑ |
| 797 | E₁ₐE₅EᵢᵢE₄ | EᵥEᵥᵢ | | Eₑ |
| 798 | E_{1b}E₅EᵢᵢE₄ | EᵥEᵥᵢ | | Eₑ |
| 799 | E₁ₐE₅EᵢᵢE_{iib}E₄ | EᵥEᵥᵢ | | Eₑ |
| 800 | E_{1b}E₅EᵢᵢE_{iib}E₄ | EᵥEᵥᵢ | | Eₑ |
| 801 | E₁ₐEᵢᵢᵢ | EᵥEᵥᵢ | | Eₑ |
| 802 | E_{1b}Eᵢᵢᵢ | EᵥEᵥᵢ | | Eₑ |
| 803 | E₁ₐE₅Eᵢᵢᵢ | EᵥEᵥᵢ | | Eₑ |
| 804 | E_{1b}E₅Eᵢᵢᵢ | EᵥEᵥᵢ | | Eₑ |
| 805 | E₁ₐEᵢᵢᵢE₄ | EᵥEᵥᵢ | | Eₑ |
| 806 | E_{1b}EᵢᵢᵢE₄ | EᵥEᵥᵢ | | Eₑ |
| 807 | E₁ₐE₅EᵢᵢᵢE₄ | EᵥEᵥᵢ | | Eₑ |
| 808 | E_{1b}E₅EᵢᵢᵢE₄ | EᵥEᵥᵢ | | Eₑ |
| 809 | E₁ₐEᵢᵥ | EᵥEᵥᵢ | | Eₑ |
| 810 | E_{1b}Eᵢᵥ | EᵥEᵥᵢ | | Eₑ |
| 811 | E₁ₐE₅Eᵢᵥ | EᵥEᵥᵢ | | Eₑ |
| 812 | E_{1b}E₅Eᵢᵥ | EᵥEᵥᵢ | | Eₑ |
| 813 | E₁ₐEᵢᵥE₄ | EᵥEᵥᵢ | | Eₑ |
| 814 | E_{1b}EᵢᵥE₄ | EᵥEᵥᵢ | | Eₑ |
| 815 | E₁ₐE₅EᵢᵥE₄ | EᵥEᵥᵢ | | Eₑ |
| 816 | E_{1b}E₅EᵢᵥE₄ | EᵥEᵥᵢ | | Eₑ |
| 817 | E₁ₐ | EᵥEᵥᵢ | E₄* | Eₑ |
| 818 | E_{1b} | EᵥEᵥᵢ | E₄* | Eₑ |
| 819 | E₁ₐE₅ | EᵥEᵥᵢ | E₄* | Eₑ |
| 820 | E_{1b}E₅ | EᵥEᵥᵢ | E₄* | Eₑ |
| 821 | E₁ₐEᵢ | EᵥEᵥᵢ | E₄* | Eₑ |
| 822 | E_{1b}Eᵢ | EᵥEᵥᵢ | E₄* | Eₑ |
| 823 | E₁ₐEᵢᵢ | EᵥEᵥᵢ | E₄* | Eₑ |
| 824 | E_{1b}Eᵢᵢ | EᵥEᵥᵢ | E₄* | Eₑ |
| 825 | E₁ₐEᵢᵢE_{iib} | EᵥEᵥᵢ | E₄* | Eₑ |
| 826 | E_{1b}EᵢᵢE_{iib} | EᵥEᵥᵢ | E₄* | Eₑ |
| 827 | E₁ₐE₅Eᵢ | EᵥEᵥᵢ | E₄* | Eₑ |
| 828 | E_{1b}E₅Eᵢ | EᵥEᵥᵢ | E₄* | Eₑ |
| 829 | E₁ₐE₅Eᵢᵢ | EᵥEᵥᵢ | E₄* | Eₑ |
| 830 | E_{1b}E₅Eᵢᵢ | EᵥEᵥᵢ | E₄* | Eₑ |
| 831 | E₁ₐE₅EᵢᵢE_{iib} | EᵥEᵥᵢ | E₄* | Eₑ |
| 832 | E_{1b}E₅EᵢᵢE_{iib} | EᵥEᵥᵢ | E₄* | Eₑ |
| 833 | E₁ₐE₄ | EᵥEᵥᵢ | E₄* | Eₑ |
| 834 | E_{1b}E₄ | EᵥEᵥᵢ | E₄* | Eₑ |
| 835 | E₁ₐE₅E₄ | EᵥEᵥᵢ | E₄* | Eₑ |
| 836 | E_{1b}E₅E₄ | EᵥEᵥᵢ | E₄* | Eₑ |
| 837 | E₁ₐEᵢE₄ | EᵥEᵥᵢ | E₄* | Eₑ |
| 838 | E_{1b}EᵢE₄ | EᵥEᵥᵢ | E₄* | Eₑ |
| 839 | E₁ₐEᵢᵢE₄ | EᵥEᵥᵢ | E₄* | Eₑ |
| 840 | E_{1b}EᵢᵢE₄ | EᵥEᵥᵢ | E₄* | Eₑ |
| 841 | E₁ₐEᵢᵢE_{iib}E₄ | EᵥEᵥᵢ | E₄* | Eₑ |
| 842 | E_{1b}EᵢᵢE_{iib}E₄ | EᵥEᵥᵢ | E₄* | Eₑ |
| 843 | E₁ₐE₅EᵢE₄ | EᵥEᵥᵢ | E₄* | Eₑ |
| 844 | E_{1b}E₅EᵢE₄ | EᵥEᵥᵢ | E₄* | Eₑ |
| 845 | E₁ₐE₅EᵢᵢE₄ | EᵥEᵥᵢ | E₄* | Eₑ |
| 846 | E_{1b}E₅EᵢᵢE₄ | EᵥEᵥᵢ | E₄* | Eₑ |
| 847 | E₁ₐE₅EᵢᵢE_{iib}E₄ | EᵥEᵥᵢ | E₄* | Eₑ |
| 848 | E_{1b}E₅EᵢᵢE_{iib}E₄ | EᵥEᵥᵢ | E₄* | Eₑ |
| 849 | E₁ₐEᵢᵢᵢ | EᵥEᵥᵢ | E₄* | Eₑ |
| 850 | E_{1b}Eᵢᵢᵢ | EᵥEᵥᵢ | E₄* | Eₑ |
| 851 | E₁ₐE₅Eᵢᵢᵢ | EᵥEᵥᵢ | E₄* | Eₑ |
| 852 | E_{1b}E₅Eᵢᵢᵢ | EᵥEᵥᵢ | E₄* | Eₑ |
| 853 | E₁ₐEᵢᵢᵢE₄ | EᵥEᵥᵢ | E₄* | Eₑ |
| 854 | E_{1b}EᵢᵢᵢE₄ | EᵥEᵥᵢ | E₄* | Eₑ |
| 855 | E₁ₐE₅EᵢᵢᵢE₄ | EᵥEᵥᵢ | E₄* | Eₑ |
| 856 | E_{1b}E₅EᵢᵢᵢE₄ | EᵥEᵥᵢ | E₄* | Eₑ |
| 857 | E₁ₐEᵢᵥ | EᵥEᵥᵢ | E₄* | Eₑ |
| 858 | E_{1b}Eᵢᵥ | EᵥEᵥᵢ | E₄* | Eₑ |
| 859 | E₁ₐE₅Eᵢᵥ | EᵥEᵥᵢ | E₄* | Eₑ |
| 860 | E_{1b}E₅Eᵢᵥ | EᵥEᵥᵢ | E₄* | Eₑ |
| 861 | E₁ₐEᵢᵥE₄ | EᵥEᵥᵢ | E₄* | Eₑ |
| 862 | E_{1b}EᵢᵥE₄ | EᵥEᵥᵢ | E₄* | Eₑ |
| 863 | E₁ₐE₅EᵢᵥE₄ | EᵥEᵥᵢ | E₄* | Eₑ |
| 864 | E_{1b}E₅EᵢᵥE₄ | EᵥEᵥᵢ | E₄* | Eₑ |
| 865 | E₁ₐ | AlkLEᵥEᵥᵢ | | Eₑ |
| 866 | E_{1b} | AlkLEᵥEᵥᵢ | | Eₑ |
| 867 | E₁ₐE₅ | AlkLEᵥEᵥᵢ | | Eₑ |
| 868 | E_{1b}E₅ | AlkLEᵥEᵥᵢ | | Eₑ |
| 869 | E₁ₐEᵢ | AlkLEᵥEᵥᵢ | | Eₑ |
| 870 | E_{1b}Eᵢ | AlkLEᵥEᵥᵢ | | Eₑ |
| 871 | E₁ₐEᵢᵢ | AlkLEᵥEᵥᵢ | | Eₑ |
| 872 | E_{1b}Eᵢᵢ | AlkLEᵥEᵥᵢ | | Eₑ |
| 873 | E₁ₐEᵢᵢE_{iib} | AlkLEᵥEᵥᵢ | | Eₑ |
| 874 | E_{1b}EᵢᵢE_{iib} | AlkLEᵥEᵥᵢ | | Eₑ |
| 875 | E₁ₐE₅Eᵢ | AlkLEᵥEᵥᵢ | | Eₑ |
| 876 | E_{1b}E₅Eᵢ | AlkLEᵥEᵥᵢ | | Eₑ |
| 877 | E₁ₐE₅Eᵢᵢ | AlkLEᵥEᵥᵢ | | Eₑ |
| 878 | E_{1b}E₅Eᵢᵢ | AlkLEᵥEᵥᵢ | | Eₑ |
| 879 | E₁ₐE₅EᵢᵢE_{iib} | AlkLEᵥEᵥᵢ | | Eₑ |
| 880 | E_{1b}E₅EᵢᵢE_{iib} | AlkLEᵥEᵥᵢ | | Eₑ |
| 881 | E₁ₐE₄ | AlkLEᵥEᵥᵢ | | Eₑ |
| 882 | E_{1b}E₄ | AlkLEᵥEᵥᵢ | | Eₑ |
| 883 | E₁ₐE₅E₄ | AlkLEᵥEᵥᵢ | | Eₑ |
| 884 | E_{1b}E₅E₄ | AlkLEᵥEᵥᵢ | | Eₑ |
| 885 | E₁ₐEᵢE₄ | AlkLEᵥEᵥᵢ | | Eₑ |
| 886 | E_{1b}EᵢE₄ | AlkLEᵥEᵥᵢ | | Eₑ |
| 887 | E₁ₐEᵢᵢE₄ | AlkLEᵥEᵥᵢ | | Eₑ |
| 888 | E_{1b}EᵢᵢE₄ | AlkLEᵥEᵥᵢ | | Eₑ |
| 889 | E₁ₐEᵢᵢE_{iib}E₄ | AlkLEᵥEᵥᵢ | | Eₑ |
| 890 | E_{1b}EᵢᵢE_{iib}E₄ | AlkLEᵥEᵥᵢ | | Eₑ |
| 891 | E₁ₐE₅EᵢE₄ | AlkLEᵥEᵥᵢ | | Eₑ |
| 892 | E_{1b}E₅EᵢE₄ | AlkLEᵥEᵥᵢ | | Eₑ |
| 893 | E₁ₐE₅EᵢᵢE₄ | AlkLEᵥEᵥᵢ | | Eₑ |
| 894 | E_{1b}E₅EᵢᵢE₄ | AlkLEᵥEᵥᵢ | | Eₑ |
| 895 | E₁ₐE₅EᵢᵢE_{iib}E₄ | AlkLEᵥEᵥᵢ | | Eₑ |
| 896 | E_{1b}E₅EᵢᵢE_{iib}E₄ | AlkLEᵥEᵥᵢ | | Eₑ |
| 897 | E₁ₐEᵢᵢᵢ | AlkLEᵥEᵥᵢ | | Eₑ |
| 898 | E_{1b}Eᵢᵢᵢ | AlkLEᵥEᵥᵢ | | Eₑ |
| 899 | E₁ₐE₅Eᵢᵢᵢ | AlkLEᵥEᵥᵢ | | Eₑ |
| 900 | E_{1b}E₅Eᵢᵢᵢ | AlkLEᵥEᵥᵢ | | Eₑ |
| 901 | E₁ₐEᵢᵢᵢE₄ | AlkLEᵥEᵥᵢ | | Eₑ |
| 902 | E_{1b}EᵢᵢᵢE₄ | AlkLEᵥEᵥᵢ | | Eₑ |
| 903 | E₁ₐE₅EᵢᵢᵢE₄ | AlkLEᵥEᵥᵢ | | Eₑ |
| 904 | E_{1b}E₅EᵢᵢᵢE₄ | AlkLEᵥEᵥᵢ | | Eₑ |
| 905 | E₁ₐEᵢᵥ | AlkLEᵥEᵥᵢ | | Eₑ |
| 906 | E_{1b}Eᵢᵥ | AlkLEᵥEᵥᵢ | | Eₑ |
| 907 | E₁ₐE₅Eᵢᵥ | AlkLEᵥEᵥᵢ | | Eₑ |
| 908 | E_{1b}E₅Eᵢᵥ | AlkLEᵥEᵥᵢ | | Eₑ |
| 909 | E₁ₐEᵢᵥE₄ | AlkLEᵥEᵥᵢ | | Eₑ |
| 910 | E_{1b}EᵢᵥE₄ | AlkLEᵥEᵥᵢ | | Eₑ |
| 911 | E₁ₐE₅EᵢᵥE₄ | AlkLEᵥEᵥᵢ | | Eₑ |
| 912 | E_{1b}E₅EᵢᵥE₄ | AlkLEᵥEᵥᵢ | | Eₑ |
| 913 | E₁ₐ | AlkLEᵥEᵥᵢ | E₄* | Eₑ |
| 914 | E_{1b} | AlkLEᵥEᵥᵢ | E₄* | Eₑ |
| 915 | E₁ₐE₅ | AlkLEᵥEᵥᵢ | E₄* | Eₑ |
| 916 | E_{1b}E₅ | AlkLEᵥEᵥᵢ | E₄* | Eₑ |
| 917 | E₁ₐEᵢ | AlkLEᵥEᵥᵢ | E₄* | Eₑ |
| 918 | E_{1b}Eᵢ | AlkLEᵥEᵥᵢ | E₄* | Eₑ |
| 919 | E₁ₐEᵢᵢ | AlkLEᵥEᵥᵢ | E₄* | Eₑ |
| 920 | E_{1b}Eᵢᵢ | AlkLEᵥEᵥᵢ | E₄* | Eₑ |
| 921 | E₁ₐEᵢᵢE_{iib} | AlkLEᵥEᵥᵢ | E₄* | Eₑ |
| 922 | E_{1b}EᵢᵢE_{iib} | AlkLEᵥEᵥᵢ | E₄* | Eₑ |
| 923 | E₁ₐE₅Eᵢ | AlkLEᵥEᵥᵢ | E₄* | Eₑ |
| 924 | E_{1b}E₅Eᵢ | AlkLEᵥEᵥᵢ | E₄* | Eₑ |
| 925 | E₁ₐE₅Eᵢᵢ | AlkLEᵥEᵥᵢ | E₄* | Eₑ |
| 926 | E_{1b}E₅Eᵢᵢ | AlkLEᵥEᵥᵢ | E₄* | Eₑ |
| 927 | E₁ₐE₅EᵢᵢE_{iib} | AlkLEᵥEᵥᵢ | E₄* | Eₑ |
| 928 | E_{1b}E₅EᵢᵢE_{iib} | AlkLEᵥEᵥᵢ | E₄* | Eₑ |
| 929 | E₁ₐE₄ | AlkLEᵥEᵥᵢ | E₄* | Eₑ |
| 930 | E_{1b}E₄ | AlkLEᵥEᵥᵢ | E₄* | Eₑ |
| 931 | E₁ₐE₅E₄ | AlkLEᵥEᵥᵢ | E₄* | Eₑ |
| 932 | E_{1b}E₅E₄ | AlkLEᵥEᵥᵢ | E₄* | Eₑ |
| 933 | E₁ₐEᵢE₄ | AlkLEᵥEᵥᵢ | E₄* | Eₑ |
| 934 | E_{1b}EᵢE₄ | AlkLEᵥEᵥᵢ | E₄* | Eₑ |
| 935 | E₁ₐEᵢᵢE₄ | AlkLEᵥEᵥᵢ | E₄* | Eₑ |
| 936 | E_{1b}EᵢᵢE₄ | AlkLEᵥEᵥᵢ | E₄* | Eₑ |
| 937 | E₁ₐEᵢᵢE_{iib}E₄ | AlkLEᵥEᵥᵢ | E₄* | Eₑ |
| 938 | E_{1b}EᵢᵢE_{iib}E₄ | AlkLEᵥEᵥᵢ | E₄* | Eₑ |
| 939 | E₁ₐE₅EᵢE₄ | AlkLEᵥEᵥᵢ | E₄* | Eₑ |
| 940 | E_{1b}E₅EᵢE₄ | AlkLEᵥEᵥᵢ | E₄* | Eₑ |
| 941 | E₁ₐE₅EᵢᵢE₄ | AlkLEᵥEᵥᵢ | E₄* | Eₑ |
| 942 | E_{1b}E₅EᵢᵢE₄ | AlkLEᵥEᵥᵢ | E₄* | Eₑ |
| 943 | E₁ₐE₅EᵢᵢE_{iib}E₄ | AlkLEᵥEᵥᵢ | E₄* | Eₑ |
| 944 | E_{1b}E₅EᵢᵢE_{iib}E₄ | AlkLEᵥEᵥᵢ | E₄* | Eₑ |
| 945 | E₁ₐEᵢᵢᵢ | AlkLEᵥEᵥᵢ | E₄* | Eₑ |
| 946 | E_{1b}Eᵢᵢᵢ | AlkLEᵥEᵥᵢ | E₄* | Eₑ |
| 947 | E₁ₐE₅Eᵢᵢᵢ | AlkLEᵥEᵥᵢ | E₄* | Eₑ |
| 948 | E_{1b}E₅Eᵢᵢᵢ | AlkLEᵥEᵥᵢ | E₄* | Eₑ |
| 949 | E₁ₐEᵢᵢᵢE₄ | AlkLEᵥEᵥᵢ | E₄* | Eₑ |
| 950 | E_{1b}EᵢᵢᵢE₄ | AlkLEᵥEᵥᵢ | E₄* | Eₑ |
| 951 | E₁ₐE₅EᵢᵢᵢE₄ | AlkLEᵥEᵥᵢ | E₄* | Eₑ |
| 952 | E_{1b}E₅EᵢᵢᵢE₄ | AlkLEᵥEᵥᵢ | E₄* | Eₑ |
| 953 | E₁ₐEᵢᵥ | AlkLEᵥEᵥᵢ | E₄* | Eₑ |
| 954 | E_{1b}Eᵢᵥ | AlkLEᵥEᵥᵢ | E₄* | Eₑ |
| 955 | E₁ₐE₅Eᵢᵥ | AlkLEᵥEᵥᵢ | E₄* | Eₑ |
| 956 | E_{1b}E₅Eᵢᵥ | AlkLEᵥEᵥᵢ | E₄* | Eₑ |
| 957 | E₁ₐEᵢᵥE₄ | AlkLEᵥEᵥᵢ | E₄* | Eₑ |
| 958 | E_{1b}EᵢᵥE₄ | AlkLEᵥEᵥᵢ | E₄* | Eₑ |
| 959 | E₁ₐE₅EᵢᵥE₄ | AlkLEᵥEᵥᵢ | E₄* | Eₑ |
| 960 | E_{1b}E₅EᵢᵥE₄ | AlkLEᵥEᵥᵢ | E₄* | Eₑ |
| 961 | E₁ₐ | EᵥEᵥᵢ | | E_{f} |
| 962 | E_{1b} | EᵥEᵥᵢ | | E_{f} |
| 963 | E₁ₐE₅ | EᵥEᵥᵢ | | E_{f} |
| 964 | E_{1b}E₅ | EᵥEᵥᵢ | | E_{f} |
| 965 | E₁ₐEᵢ | EᵥEᵥᵢ | | E_{f} |
| 966 | E_{1b}Eᵢ | EᵥEᵥᵢ | | E_{f} |
| 967 | E₁ₐEᵢᵢ | EᵥEᵥᵢ | | E_{f} |
| 968 | E_{1b}Eᵢᵢ | EᵥEᵥᵢ | | E_{f} |
| 969 | E₁ₐEᵢᵢE_{iib} | EᵥEᵥᵢ | | E_{f} |
| 970 | E_{1b}EᵢᵢE_{iib} | EᵥEᵥᵢ | | E_{f} |
| 971 | E₁ₐE₅Eᵢ | EᵥEᵥᵢ | | E_{f} |
| 972 | E_{1b}E₅Eᵢ | EᵥEᵥᵢ | | E_{f} |
| 973 | E₁ₐE₅Eᵢᵢ | EᵥEᵥᵢ | | E_{f} |
| 974 | E_{1b}E₅Eᵢᵢ | EᵥEᵥᵢ | | E_{f} |
| 975 | E₁ₐE₅EᵢᵢE_{iib} | EᵥEᵥᵢ | | E_{f} |
| 976 | E_{1b}E₅EᵢᵢE_{iib} | EᵥEᵥᵢ | | E_{f} |
| 977 | E₁ₐE₄ | EᵥEᵥᵢ | | E_{f} |
| 978 | E_{1b}E₄ | EᵥEᵥᵢ | | E_{f} |
| 979 | E₁ₐE₅E₄ | EᵥEᵥᵢ | | E_{f} |
| 980 | E_{1b}E₅E₄ | EᵥEᵥᵢ | | E_{f} |
| 981 | E₁ₐEᵢE₄ | EᵥEᵥᵢ | | E_{f} |
| 982 | E_{1b}EᵢE₄ | EᵥEᵥᵢ | | E_{f} |
| 983 | E₁ₐEᵢᵢE₄ | EᵥEᵥᵢ | | E_{f} |
| 984 | E_{1b}EᵢᵢE₄ | EᵥEᵥᵢ | | E_{f} |
| 985 | E₁ₐEᵢᵢE_{iib}E₄ | EᵥEᵥᵢ | | E_{f} |
| 986 | E_{1b}EᵢᵢE_{iib}E₄ | EᵥEᵥᵢ | | E_{f} |
| 987 | E₁ₐE₅EᵢE₄ | EᵥEᵥᵢ | | E_{f} |
| 988 | E_{1b}E₅EᵢE₄ | EᵥEᵥᵢ | | E_{f} |
| 989 | E₁ₐE₅EᵢᵢE₄ | EᵥEᵥᵢ | | E_{f} |
| 990 | E_{1b}E₅EᵢᵢE₄ | EᵥEᵥᵢ | | E_{f} |
| 991 | E₁ₐE₅EᵢᵢE_{iib}E₄ | EᵥEᵥᵢ | | E_{f} |
| 992 | E_{1b}E₅EᵢᵢE_{iib}E₄ | EᵥEᵥᵢ | | E_{f} |
| 993 | E₁ₐEᵢᵢᵢ | EᵥEᵥᵢ | | E_{f} |
| 994 | E_{1b}Eᵢᵢᵢ | EᵥEᵥᵢ | | E_{f} |
| 995 | E₁ₐE₅Eᵢᵢᵢ | EᵥEᵥᵢ | | E_{f} |
| 996 | E_{1b}E₅Eᵢᵢᵢ | EᵥEᵥᵢ | | E_{f} |
| 997 | E₁ₐEᵢᵢᵢE₄ | EᵥEᵥᵢ | | E_{f} |
| 998 | E_{1b}EᵢᵢᵢE₄ | EᵥEᵥᵢ | | E_{f} |
| 999 | E₁ₐE₅EᵢᵢᵢE₄ | EᵥEᵥᵢ | | E_{f} |
| 1000 | E_{1b}E₅EᵢᵢᵢE₄ | EᵥEᵥᵢ | | E_{f} |
| 1001 | E₁ₐEᵢᵥ | EᵥEᵥᵢ | | E_{f} |
| 1002 | E_{1b}Eᵢᵥ | EᵥEᵥᵢ | | E_{f} |
| 1003 | E₁ₐE₅Eᵢᵥ | EᵥEᵥᵢ | | E_{f} |
| 1004 | E_{1b}E₅Eᵢᵥ | EᵥEᵥᵢ | | E_{f} |
| 1005 | E₁ₐEᵢᵥE₄ | EᵥEᵥᵢ | | E_{f} |
| 1006 | E_{1b}EᵢᵥE₄ | EᵥEᵥᵢ | | E_{f} |
| 1007 | E₁ₐE₅EᵢᵥE₄ | EᵥEᵥᵢ | | E_{f} |
| 1008 | E_{1b}E₅EᵢᵥE₄ | EᵥEᵥᵢ | | E_{f} |
| 1009 | E₁ₐ | EᵥEᵥᵢ | E₄* | E_{f} |
| 1010 | E_{1b} | EᵥEᵥᵢ | E₄* | E_{f} |
| 1011 | E₁ₐE₅ | EᵥEᵥᵢ | E₄* | E_{f} |
| 1012 | E_{1b}E₅ | EᵥEᵥᵢ | E₄* | E_{f} |
| 1013 | E₁ₐEᵢ | EᵥEᵥᵢ | E₄* | E_{f} |
| 1014 | E_{1b}Eᵢ | EᵥEᵥᵢ | E₄* | E_{f} |
| 1015 | E₁ₐEᵢᵢ | EᵥEᵥᵢ | E₄* | E_{f} |
| 1016 | E_{1b}Eᵢᵢ | EᵥEᵥᵢ | E₄* | E_{f} |
| 1017 | E₁ₐEᵢᵢE_{iib} | EᵥEᵥᵢ | E₄* | E_{f} |
| 1018 | E_{1b}EᵢᵢE_{iib} | EᵥEᵥᵢ | E₄* | E_{f} |
| 1019 | E₁ₐE₅Eᵢ | EᵥEᵥᵢ | E₄* | E_{f} |
| 1020 | E_{1b}E₅Eᵢ | EᵥEᵥᵢ | E₄* | E_{f} |
| 1021 | E₁ₐE₅Eᵢᵢ | EᵥEᵥᵢ | E₄* | E_{f} |
| 1022 | E_{1b}E₅Eᵢᵢ | EᵥEᵥᵢ | E₄* | E_{f} |
| 1023 | E₁ₐE₅EᵢᵢE_{iib} | EᵥEᵥᵢ | E₄* | E_{f} |
| 1024 | E_{1b}E₅EᵢᵢE_{iib} | EᵥEᵥᵢ | E₄* | E_{f} |
| 1025 | E₁ₐE₄ | EᵥEᵥᵢ | E₄* | E_{f} |
| 1026 | E_{1b}E₄ | EᵥEᵥᵢ | E₄* | E_{f} |
| 1027 | E₁ₐE₅E₄ | EᵥEᵥᵢ | E₄* | E_{f} |
| 1028 | E_{1b}E₅E₄ | EᵥEᵥᵢ | E₄* | E_{f} |
| 1029 | E₁ₐEᵢE₄ | EᵥEᵥᵢ | E₄* | E_{f} |
| 1030 | E_{1b}EᵢE₄ | EᵥEᵥᵢ | E₄* | E_{f} |
| 1031 | E₁ₐEᵢᵢE₄ | EᵥEᵥᵢ | E₄* | E_{f} |
| 1032 | E_{1b}EᵢᵢE₄ | EᵥEᵥᵢ | E₄* | E_{f} |
| 1033 | E₁ₐEᵢᵢE_{iib}E₄ | EᵥEᵥᵢ | E₄* | E_{f} |
| 1034 | E_{1b}EᵢᵢE_{iib}E₄ | EᵥEᵥᵢ | E₄* | E_{f} |
| 1035 | E₁ₐE₅EᵢE₄ | EᵥEᵥᵢ | E₄* | E_{f} |
| 1036 | E_{1b}E₅EᵢE₄ | EᵥEᵥᵢ | E₄* | E_{f} |
| 1037 | E₁ₐE₅EᵢᵢE₄ | EᵥEᵥᵢ | E₄* | E_{f} |
| 1038 | E_{1b}E₅EᵢᵢE₄ | EᵥEᵥᵢ | E₄* | E_{f} |
| 1039 | E₁ₐE₅EᵢᵢE_{iib}E₄ | EᵥEᵥᵢ | E₄* | E_{f} |
| 1040 | E_{1b}E₅EᵢᵢE_{iib}E₄ | EᵥEᵥᵢ | E₄* | E_{f} |
| 1041 | E₁ₐEᵢᵢᵢ | EᵥEᵥᵢ | E₄* | E_{f} |
| 1042 | E_{1b}Eᵢᵢᵢ | EᵥEᵥᵢ | E₄* | E_{f} |
| 1043 | E₁ₐE₅Eᵢᵢᵢ | EᵥEᵥᵢ | E₄* | E_{f} |
| 1044 | E_{1b}E₅Eᵢᵢᵢ | EᵥEᵥᵢ | E₄* | E_{f} |
| 1045 | E₁ₐEᵢᵢᵢE₄ | EᵥEᵥᵢ | E₄* | E_{f} |
| 1046 | E_{1b}EᵢᵢᵢE₄ | EᵥEᵥᵢ | E₄* | E_{f} |
| 1047 | E₁ₐE₅EᵢᵢᵢE₄ | EᵥEᵥᵢ | E₄* | E_{f} |
| 1048 | E_{1b}E₅EᵢᵢᵢE₄ | EᵥEᵥᵢ | E₄* | E_{f} |
| 1049 | E₁ₐEᵢᵥ | EᵥEᵥᵢ | E₄* | E_{f} |
| 1050 | E_{1b}Eᵢᵥ | EᵥEᵥᵢ | E₄* | E_{f} |
| 1051 | E₁ₐE₅Eᵢᵥ | EᵥEᵥᵢ | E₄* | E_{f} |
| 1052 | E_{1b}E₅Eᵢᵥ | EᵥEᵥᵢ | E₄* | E_{f} |
| 1053 | E₁ₐEᵢᵥE₄ | EᵥEᵥᵢ | E₄* | E_{f} |
| 1054 | E_{1b}EᵢᵥE₄ | EᵥEᵥᵢ | E₄* | E_{f} |
| 1055 | E₁ₐE₅EᵢᵥE₄ | EᵥEᵥᵢ | E₄* | E_{f} |
| 1056 | E_{1b}E₅EᵢᵥE₄ | EᵥEᵥᵢ | E₄* | E_{f} |
| 1057 | E₁ₐ | AlkLEᵥEᵥᵢ | | E_{f} |
| 1058 | E_{1b} | AlkLEᵥEᵥᵢ | | E_{f} |
| 1059 | E₁ₐE₅ | AlkLEᵥEᵥᵢ | | E_{f} |
| 1060 | E_{1b}E₅ | AlkLEᵥEᵥᵢ | | E_{f} |
| 1061 | E₁ₐEᵢ | AlkLEᵥEᵥᵢ | | E_{f} |
| 1062 | E_{1b}Eᵢ | AlkLEᵥEᵥᵢ | | E_{f} |
| 1063 | E₁ₐEᵢᵢ | AlkLEᵥEᵥᵢ | | E_{f} |
| 1064 | E_{1b}Eᵢᵢ | AlkLEᵥEᵥᵢ | | E_{f} |
| 1065 | E₁ₐEᵢᵢE_{iib} | AlkLEᵥEᵥᵢ | | E_{f} |
| 1066 | E_{1b}EᵢᵢE_{iib} | AlkLEᵥEᵥᵢ | | E_{f} |
| 1067 | E₁ₐE₅Eᵢ | AlkLEᵥEᵥᵢ | | E_{f} |
| 1068 | E_{1b}E₅Eᵢ | AlkLEᵥEᵥᵢ | | E_{f} |
| 1069 | E₁ₐE₅Eᵢᵢ | AlkLEᵥEᵥᵢ | | E_{f} |
| 1070 | E_{1b}E₅Eᵢᵢ | AlkLEᵥEᵥᵢ | | E_{f} |
| 1071 | E₁ₐE₅EᵢᵢE_{iib} | AlkLEᵥEᵥᵢ | | E_{f} |
| 1072 | E_{1b}E₅EᵢᵢE_{iib} | AlkLEᵥEᵥᵢ | | E_{f} |
| 1073 | E₁ₐE₄ | AlkLEᵥEᵥᵢ | | E_{f} |
| 1074 | E_{1b}E₄ | AlkLEᵥEᵥᵢ | | E_{f} |
| 1075 | E₁ₐE₅E₄ | AlkLEᵥEᵥᵢ | | E_{f} |
| 1076 | E_{1b}E₅E₄ | AlkLEᵥEᵥᵢ | | E_{f} |
| 1077 | E₁ₐEᵢE₄ | AlkLEᵥEᵥᵢ | | E_{f} |
| 1078 | E_{1b}EᵢE₄ | AlkLEᵥEᵥᵢ | | E_{f} |
| 1079 | E₁ₐEᵢᵢE₄ | AlkLEᵥEᵥᵢ | | E_{f} |
| 1080 | E_{1b}EᵢᵢE₄ | AlkLEᵥEᵥᵢ | | E_{f} |
| 1081 | E₁ₐEᵢᵢE_{iib}E₄ | AlkLEᵥEᵥᵢ | | E_{f} |
| 1082 | E_{1b}EᵢᵢE_{iib}E₄ | AlkLEᵥEᵥᵢ | | E_{f} |
| 1083 | E₁ₐE₅EᵢE₄ | AlkLEᵥEᵥᵢ | | E_{f} |
| 1084 | E_{1b}E₅EᵢE₄ | AlkLEᵥEᵥᵢ | | E_{f} |
| 1085 | E₁ₐE₅EᵢᵢE₄ | AlkLEᵥEᵥᵢ | | E_{f} |
| 1086 | E_{1b}E₅EᵢᵢE₄ | AlkLEᵥEᵥᵢ | | E_{f} |
| 1087 | E₁ₐE₅EᵢᵢE_{iib}E₄ | AlkLEᵥEᵥᵢ | | E_{f} |
| 1088 | E_{1b}E₅EᵢᵢE_{iib}E₄ | AlkLEᵥEᵥᵢ | | E_{f} |
| 1089 | E₁ₐEᵢᵢᵢ | AlkLEᵥEᵥᵢ | | E_{f} |
| 1090 | E_{1b}Eᵢᵢᵢ | AlkLEᵥEᵥᵢ | | E_{f} |
| 1091 | E₁ₐE₅Eᵢᵢᵢ | AlkLEᵥEᵥᵢ | | E_{f} |
| 1092 | E_{1b}E₅Eᵢᵢᵢ | AlkLEᵥEᵥᵢ | | E_{f} |
| 1093 | E₁ₐEᵢᵢᵢE₄ | AlkLEᵥEᵥᵢ | | E_{f} |
| 1094 | E_{1b}EᵢᵢᵢE₄ | AlkLEᵥEᵥᵢ | | E_{f} |
| 1095 | E₁ₐE₅EᵢᵢᵢE₄ | AlkLEᵥEᵥᵢ | | E_{f} |
| 1096 | E_{1b}E₅EᵢᵢᵢE₄ | AlkLEᵥEᵥᵢ | | E_{f} |
| 1097 | E₁ₐEᵢᵥ | AlkLEᵥEᵥᵢ | | E_{f} |
| 1098 | E_{1b}Eᵢᵥ | AlkLEᵥEᵥᵢ | | E_{f} |
| 1099 | E₁ₐE₅Eᵢᵥ | AlkLEᵥEᵥᵢ | | E_{f} |
| 1100 | E_{1b}E₅Eᵢᵥ | AlkLEᵥEᵥᵢ | | E_{f} |
| 1101 | E₁ₐEᵢᵥE₄ | AlkLEᵥEᵥᵢ | | E_{f} |
| 1102 | E_{1b}EᵢᵥE₄ | AlkLEᵥEᵥᵢ | | E_{f} |
| 1103 | E₁ₐE₅EᵢᵥE₄ | AlkLEᵥEᵥᵢ | | E_{f} |
| 1104 | E_{1b}E₅EᵢᵥE₄ | AlkLEᵥEᵥᵢ | | E_{f} |
| 1105 | E₁ₐ | AlkLEᵥEᵥᵢ | E₄* | E_{f} |
| 1106 | E_{1b} | AlkLEᵥEᵥᵢ | E₄* | E_{f} |
| 1107 | E₁ₐE₅ | AlkLEᵥEᵥᵢ | E₄* | E_{f} |
| 1108 | E_{1b}E₅ | AlkLEᵥEᵥᵢ | E₄* | E_{f} |
| 1109 | E₁ₐEᵢ | AlkLEᵥEᵥᵢ | E₄* | E_{f} |
| 1110 | E_{1b}Eᵢ | AlkLEᵥEᵥᵢ | E₄* | E_{f} |
| 1111 | E₁ₐEᵢᵢ | AlkLEᵥEᵥᵢ | E₄* | E_{f} |
| 1112 | E_{1b}Eᵢᵢ | AlkLEᵥEᵥᵢ | E₄* | E_{f} |
| 1113 | E₁ₐEᵢᵢE_{iib} | AlkLEᵥEᵥᵢ | E₄* | E_{f} |
| 1114 | E_{1b}EᵢᵢE_{iib} | AlkLEᵥEᵥᵢ | E₄* | E_{f} |
| 1115 | E₁ₐE₅Eᵢ | AlkLEᵥEᵥᵢ | E₄* | E_{f} |
| 1116 | E_{1b}E₅Eᵢ | AlkLEᵥEᵥᵢ | E₄* | E_{f} |
| 1117 | E₁ₐE₅Eᵢᵢ | AlkLEᵥEᵥᵢ | E₄* | E_{f} |
| 1118 | E_{1b}E₅Eᵢᵢ | AlkLEᵥEᵥᵢ | E₄* | E_{f} |
| 1119 | E₁ₐE₅EᵢᵢE_{iib} | AlkLEᵥEᵥᵢ | E₄* | E_{f} |
| 1120 | E_{1b}E₅EᵢᵢE_{iib} | AlkLEᵥEᵥᵢ | E₄* | E_{f} |
| 1121 | E₁ₐE₄ | AlkLEᵥEᵥᵢ | E₄* | E_{f} |
| 1122 | E_{1b}E₄ | AlkLEᵥEᵥᵢ | E₄* | E_{f} |
| 1123 | E₁ₐE₅E₄ | AlkLEᵥEᵥᵢ | E₄* | E_{f} |
| 1124 | E_{1b}E₅E₄ | AlkLEᵥEᵥᵢ | E₄* | E_{f} |
| 1125 | E₁ₐEᵢE₄ | AlkLEᵥEᵥᵢ | E₄* | E_{f} |
| 1126 | E_{1b}EᵢE₄ | AlkLEᵥEᵥᵢ | E₄* | E_{f} |
| 1127 | E₁ₐEᵢᵢE₄ | AlkLEᵥEᵥᵢ | E₄* | E_{f} |
| 1128 | E_{1b}EᵢᵢE₄ | AlkLEᵥEᵥᵢ | E₄* | E_{f} |
| 1129 | E₁ₐEᵢᵢE_{iib}E₄ | AlkLEᵥEᵥᵢ | E₄* | E_{f} |
| 1130 | E_{1b}EᵢᵢE_{iib}E₄ | AlkLEᵥEᵥᵢ | E₄* | E_{f} |
| 1131 | E₁ₐE₅EᵢE₄ | AlkLEᵥEᵥᵢ | E₄* | E_{f} |
| 1132 | E_{1b}E₅EᵢE₄ | AlkLEᵥEᵥᵢ | E₄* | E_{f} |
| 1133 | E₁ₐE₅EᵢᵢE₄ | AlkLEᵥEᵥᵢ | E₄* | E_{f} |
| 1134 | E_{1b}E₅EᵢᵢE₄ | AlkLEᵥEᵥᵢ | E₄* | E_{f} |
| 1135 | E₁ₐE₅EᵢᵢE_{iib}E₄ | AlkLEᵥEᵥᵢ | E₄* | E_{f} |
| 1136 | E_{1b}E₅EᵢᵢE_{iib}E₄ | AlkLEᵥEᵥᵢ | E₄* | E_{f} |
| 1137 | E₁ₐEᵢᵢᵢ | AlkLEᵥEᵥᵢ | E₄* | E_{f} |
| 1138 | E_{1b}Eᵢᵢᵢ | AlkLEᵥEᵥᵢ | E₄* | E_{f} |
| 1139 | E₁ₐE₅Eᵢᵢᵢ | AlkLEᵥEᵥᵢ | E₄* | E_{f} |
| 1140 | E_{1b}E₅Eᵢᵢᵢ | AlkLEᵥEᵥᵢ | E₄* | E_{f} |
| 1141 | E₁ₐEᵢᵢᵢE₄ | AlkLEᵥEᵥᵢ | E₄* | E_{f} |
| 1142 | E_{1b}EᵢᵢᵢE₄ | AlkLEᵥEᵥᵢ | E₄* | E_{f} |
| 1143 | E₁ₐE₅EᵢᵢᵢE₄ | AlkLEᵥEᵥᵢ | E₄* | E_{f} |
| 1144 | E_{1b}E₅EᵢᵢᵢE₄ | AlkLEᵥEᵥᵢ | E₄* | E_{f} |
| 1145 | E₁ₐEᵢᵥ | AlkLEᵥEᵥᵢ | E₄* | E_{f} |
| 1146 | E_{1b}Eᵢᵥ | AlkLEᵥEᵥᵢ | E₄* | E_{f} |
| 1147 | E₁ₐE₅Eᵢᵥ | AlkLEᵥEᵥᵢ | E₄* | E_{f} |
| 1148 | E_{1b}E₅Eᵢᵥ | AlkLEᵥEᵥᵢ | E₄* | E_{f} |
| 1149 | E₁ₐEᵢᵥE₄ | AlkLEᵥEᵥᵢ | E₄* | E_{f} |
| 1150 | E_{1b}EᵢᵥE₄ | AlkLEᵥEᵥᵢ | E₄* | E_{f} |
| 1151 | E₁ₐE₅EᵢᵥE₄ | AlkLEᵥEᵥᵢ | E₄* | E_{f} |
| 1152 | E_{1b}E₅EᵢᵥE₄ | AlkLEᵥEᵥᵢ | E₄* | E_{f} |
| 1153 | E₁ₐ | Eᵥᵢᵢ | | |
| 1154 | E_{1b} | Eᵥᵢᵢ | | |
| 1155 | E₁ₐE₅ | Eᵥᵢᵢ | | |
| 1156 | E_{1b}E₅ | Eᵥᵢᵢ | | |
| 1157 | E₁ₐEᵢ | Eᵥᵢᵢ | | |
| 1158 | E_{1b}Eᵢ | Eᵥᵢᵢ | | |
| 1159 | E₁ₐEᵢᵢ | Eᵥᵢᵢ | | |
| 1160 | E_{1b}Eᵢᵢ | Eᵥᵢᵢ | | |
| 1161 | E₁ₐEᵢᵢE_{iib} | Eᵥᵢᵢ | | |
| 1162 | E_{1b}EᵢᵢE_{iib} | Eᵥᵢᵢ | | |
| 1163 | E₁ₐE₅Eᵢ | Eᵥᵢᵢ | | |
| 1164 | E_{1b}E₅Eᵢ | Eᵥᵢᵢ | | |
| 1165 | E₁ₐE₅Eᵢᵢ | Eᵥᵢᵢ | | |
| 1166 | E_{1b}E₅Eᵢᵢ | Eᵥᵢᵢ | | |
| 1167 | E₁ₐE₅EᵢᵢE_{iib} | Eᵥᵢᵢ | | |
| 1168 | E_{1b}E₅EᵢᵢE_{iib} | Eᵥᵢᵢ | | |
| 1169 | E₁ₐE₄ | Eᵥᵢᵢ | | |
| 1170 | E_{1b}E₄ | Eᵥᵢᵢ | | |
| 1171 | E₁ₐE₅E₄ | Eᵥᵢᵢ | | |
| 1172 | E_{1b}E₅E₄ | Eᵥᵢᵢ | | |
| 1173 | E₁ₐEᵢE₄ | Eᵥᵢᵢ | | |
| 1174 | E_{1b}EᵢE₄ | Eᵥᵢᵢ | | |
| 1175 | E₁ₐEᵢᵢE₄ | Eᵥᵢᵢ | | |
| 1176 | E_{1b}EᵢᵢE₄ | Eᵥᵢᵢ | | |
| 1177 | E₁ₐEᵢᵢE_{iib}E₄ | Eᵥᵢᵢ | | |
| 1178 | E_{1b}EᵢᵢE_{iib}E₄ | Eᵥᵢᵢ | | |
| 1179 | E₁ₐE₅EᵢE₄ | Eᵥᵢᵢ | | |
| 1180 | E_{1b}E₅EᵢE₄ | Eᵥᵢᵢ | | |
| 1181 | E₁ₐE₅EᵢᵢE₄ | Eᵥᵢᵢ | | |
| 1182 | E_{1b}E₅EᵢᵢE₄ | Eᵥᵢᵢ | | |
| 1183 | E₁ₐE₅EᵢᵢE_{iib}E₄ | Eᵥᵢᵢ | | |
| 1184 | E_{1b}E₅EᵢᵢE_{iib}E₄ | Eᵥᵢᵢ | | |
| 1185 | E₁ₐEᵢᵢᵢ | Eᵥᵢᵢ | | |
| 1186 | E_{1b}Eᵢᵢᵢ | Eᵥᵢᵢ | | |
| 1187 | E₁ₐE₅Eᵢᵢᵢ | Eᵥᵢᵢ | | |
| 1188 | E_{1b}E₅Eᵢᵢᵢ | Eᵥᵢᵢ | | |
| 1189 | E₁ₐEᵢᵢᵢE₄ | Eᵥᵢᵢ | | |
| 1190 | E_{1b}EᵢᵢᵢE₄ | Eᵥᵢᵢ | | |
| 1191 | E₁ₐE₅EᵢᵢᵢE₄ | Eᵥᵢᵢ | | |
| 1192 | E_{1b}E₅EᵢᵢᵢE₄ | Eᵥᵢᵢ | | |
| 1193 | E₁ₐEᵢᵥ | Eᵥᵢᵢ | | |
| 1194 | E_{1b}Eᵢᵥ | Eᵥᵢᵢ | | |
| 1195 | E₁ₐE₅Eᵢᵥ | Eᵥᵢᵢ | | |
| 1196 | E_{1b}E₅Eᵢᵥ | Eᵥᵢᵢ | | |
| 1197 | E₁ₐEᵢᵥE₄ | Eᵥᵢᵢ | | |
| 1198 | E_{1b}EᵢᵥE₄ | Eᵥᵢᵢ | | |
| 1199 | E₁ₐE₅EᵢᵥE₄ | Eᵥᵢᵢ | | |
| 1200 | E_{1b}E₅EᵢᵥE₄ | Eᵥᵢᵢ | | |
| 1201 | E₁ₐ | Eᵥᵢᵢ | E₄* | |
| 1202 | E_{1b} | Eᵥᵢᵢ | E₄* | |
| 1203 | E₁ₐE₅ | Eᵥᵢᵢ | E₄* | |
| 1204 | E_{1b}E₅ | Eᵥᵢᵢ | E₄* | |
| 1205 | E₁ₐEᵢ | Eᵥᵢᵢ | E₄* | |
| 1206 | E_{1b}Eᵢ | Eᵥᵢᵢ | E₄* | |
| 1207 | E₁ₐEᵢᵢ | Eᵥᵢᵢ | E₄* | |
| 1208 | E_{1b}Eᵢᵢ | Eᵥᵢᵢ | E₄* | |
| 1209 | E₁ₐEᵢᵢE_{iib} | Eᵥᵢᵢ | E₄* | |
| 1210 | E_{1b}EᵢᵢE_{iib} | Eᵥᵢᵢ | E₄* | |
| 1211 | E₁ₐE₅Eᵢ | Eᵥᵢᵢ | E₄* | |
| 1212 | E_{1b}E₅Eᵢ | Eᵥᵢᵢ | E₄* | |
| 1213 | E₁ₐE₅Eᵢᵢ | Eᵥᵢᵢ | E₄* | |
| 1214 | E_{1b}E₅Eᵢᵢ | Eᵥᵢᵢ | E₄* | |
| 1215 | E₁ₐE₅EᵢᵢE_{iib} | Eᵥᵢᵢ | E₄* | |
| 1216 | E_{1b}E₅EᵢᵢE_{iib} | Eᵥᵢᵢ | E₄* | |
| 1217 | E₁ₐE₄ | Eᵥᵢᵢ | E₄* | |
| 1218 | E_{1b}E₄ | Eᵥᵢᵢ | E₄* | |
| 1219 | E₁ₐE₅E₄ | Eᵥᵢᵢ | E₄* | |
| 1220 | E_{1b}E₅E₄ | Eᵥᵢᵢ | E₄* | |
| 1221 | E₁ₐEᵢE₄ | Eᵥᵢᵢ | E₄* | |
| 1222 | E_{1b}EᵢE₄ | Eᵥᵢᵢ | E₄* | |
| 1223 | E₁ₐEᵢᵢE₄ | Eᵥᵢᵢ | E₄* | |
| 1224 | E_{1b}EᵢᵢE₄ | Eᵥᵢᵢ | E₄* | |
| 1225 | E₁ₐEᵢᵢE_{iib}E₄ | Eᵥᵢᵢ | E₄* | |
| 1226 | E_{1b}EᵢᵢE_{iib}E₄ | Eᵥᵢᵢ | E₄* | |
| 1227 | E₁ₐE₅EᵢE₄ | Eᵥᵢᵢ | E₄* | |
| 1228 | E_{1b}E₅EᵢE₄ | Eᵥᵢᵢ | E₄* | |
| 1229 | E₁ₐE₅EᵢᵢE₄ | Eᵥᵢᵢ | E₄* | |
| 1230 | E_{1b}E₅EᵢᵢE₄ | Eᵥᵢᵢ | E₄* | |
| 1231 | E₁ₐE₅EᵢᵢE_{iib}E₄ | Eᵥᵢᵢ | E₄* | |
| 1232 | E_{1b}E₅EᵢᵢE_{iib}E₄ | Eᵥᵢᵢ | E₄* | |
| 1233 | E₁ₐEᵢᵢᵢ | Eᵥᵢᵢ | E₄* | |
| 1234 | E_{1b}Eᵢᵢᵢ | Eᵥᵢᵢ | E₄* | |
| 1235 | E₁ₐE₅Eᵢᵢᵢ | Eᵥᵢᵢ | E₄* | |
| 1236 | E_{1b}E₅Eᵢᵢᵢ | Eᵥᵢᵢ | E₄* | |
| 1237 | E₁ₐEᵢᵢᵢE₄ | Eᵥᵢᵢ | E₄* | |
| 1238 | E_{1b}EᵢᵢᵢE₄ | Eᵥᵢᵢ | E₄* | |
| 1239 | E₁ₐE₅EᵢᵢᵢE₄ | Eᵥᵢᵢ | E₄* | |
| 1240 | E_{1b}E₅EᵢᵢᵢE₄ | Eᵥᵢᵢ | E₄* | |
| 1241 | E₁ₐEᵢᵥ | Eᵥᵢᵢ | E₄* | |
| 1242 | E_{1b}Eᵢᵥ | Eᵥᵢᵢ | E₄* | |
| 1243 | E₁ₐE₅Eᵢᵥ | Eᵥᵢᵢ | E₄* | |
| 1244 | E_{1b}E₅Eᵢᵥ | Eᵥᵢᵢ | E₄* | |
| 1245 | E₁ₐEᵢᵥE₄ | Eᵥᵢᵢ | E₄* | |
| 1246 | E_{1b}EᵢᵥE₄ | Eᵥᵢᵢ | E₄* | |
| 1247 | E₁ₐE₅EᵢᵥE₄ | Eᵥᵢᵢ | E₄* | |
| 1248 | E_{1b}E₅EᵢᵥE₄ | Eᵥᵢᵢ | E₄* | |
| 1249 | E₁ₐ | AlkLEᵥᵢᵢ | | |
| 1250 | E_{1b} | AlkLEᵥᵢᵢ | | |
| 1251 | E₁ₐE₅ | AlkLEᵥᵢᵢ | | |
| 1252 | E_{1b}E₅ | AlkLEᵥᵢᵢ | | |
| 1253 | E₁ₐEᵢ | AlkLEᵥᵢᵢ | | |
| 1254 | E_{1b}Eᵢ | AlkLEᵥᵢᵢ | | |
| 1255 | E₁ₐEᵢᵢ | AlkLEᵥᵢᵢ | | |
| 1256 | E_{1b}Eᵢᵢ | AlkLEᵥᵢᵢ | | |
| 1257 | E₁ₐEᵢᵢE_{iib} | AlkLEᵥᵢᵢ | | |
| 1258 | E_{1b}EᵢᵢE_{iib} | AlkLEᵥᵢᵢ | | |
| 1259 | E₁ₐE₅Eᵢ | AlkLEᵥᵢᵢ | | |
| 1260 | E_{1b}E₅Eᵢ | AlkLEᵥᵢᵢ | | |
| 1261 | E₁ₐE₅Eᵢᵢ | AlkLEᵥᵢᵢ | | |
| 1262 | E_{1b}E₅Eᵢᵢ | AlkLEᵥᵢᵢ | | |
| 1263 | E₁ₐE₅EᵢᵢE_{iib} | AlkLEᵥᵢᵢ | | |
| 1264 | E_{1b}E₅EᵢᵢE_{iib} | AlkLEᵥᵢᵢ | | |
| 1265 | E₁ₐE₄ | AlkLEᵥᵢᵢ | | |
| 1266 | E_{1b}E₄ | AlkLEᵥᵢᵢ | | |
| 1267 | E₁ₐE₅E₄ | AlkLEᵥᵢᵢ | | |
| 1268 | E_{1b}E₅E₄ | AlkLEᵥᵢᵢ | | |
| 1269 | E₁ₐEᵢE₄ | AlkLEᵥᵢᵢ | | |
| 1270 | E_{1b}EᵢE₄ | AlkLEᵥᵢᵢ | | |
| 1271 | E₁ₐEᵢᵢE₄ | AlkLEᵥᵢᵢ | | |
| 1272 | E_{1b}EᵢᵢE₄ | AlkLEᵥᵢᵢ | | |
| 1273 | E₁ₐEᵢᵢE_{iib}E₄ | AlkLEᵥᵢᵢ | | |
| 1274 | E_{1b}EᵢᵢE_{iib}E₄ | AlkLEᵥᵢᵢ | | |
| 1275 | E₁ₐE₅EᵢE₄ | AlkLEᵥᵢᵢ | | |
| 1276 | E_{1b}E₅EᵢE₄ | AlkLEᵥᵢᵢ | | |
| 1277 | E₁ₐE₅EᵢᵢE₄ | AlkLEᵥᵢᵢ | | |
| 1278 | E_{1b}E₅EᵢᵢE₄ | AlkLEᵥᵢᵢ | | |
| 1279 | E₁ₐE₅EᵢᵢE_{iib}E₄ | AlkLEᵥᵢᵢ | | |
| 1280 | E_{1b}E₅EᵢᵢE_{iib}E₄ | AlkLEᵥᵢᵢ | | |
| 1281 | E₁ₐEᵢᵢᵢ | AlkLEᵥᵢᵢ | | |
| 1282 | E_{1b}Eᵢᵢᵢ | AlkLEᵥᵢᵢ | | |
| 1283 | E₁ₐE₅Eᵢᵢᵢ | AlkLEᵥᵢᵢ | | |
| 1284 | E_{1b}E₅Eᵢᵢᵢ | AlkLEᵥᵢᵢ | | |
| 1285 | E₁ₐEᵢᵢᵢE₄ | AlkLEᵥᵢᵢ | | |
| 1286 | E_{1b}EᵢᵢᵢE₄ | AlkLEᵥᵢᵢ | | |
| 1287 | E₁ₐE₅EᵢᵢᵢE₄ | AlkLEᵥᵢᵢ | | |
| 1288 | E_{1b}E₅EᵢᵢᵢE₄ | AlkLEᵥᵢᵢ | | |
| 1289 | E₁ₐEᵢᵥ | AlkLEᵥᵢᵢ | | |
| 1290 | E_{1b}Eᵢᵥ | AlkLEᵥᵢᵢ | | |
| 1291 | E₁ₐE₅Eᵢᵥ | AlkLEᵥᵢᵢ | | |
| 1292 | E_{1b}E₅Eᵢᵥ | AlkLEᵥᵢᵢ | | |
| 1293 | E₁ₐEᵢᵥE₄ | AlkLEᵥᵢᵢ | | |
| 1294 | E_{1b}EᵢᵥE₄ | AlkLEᵥᵢᵢ | | |
| 1295 | E₁ₐE₅EᵢᵥE₄ | AlkLEᵥᵢᵢ | | |
| 1296 | E_{1b}E₅EᵢᵥE₄ | AlkLEᵥᵢᵢ | | |
| 1297 | E₁ₐ | AlkLEᵥᵢᵢ | E₄* | |
| 1298 | E_{1b} | AlkLEᵥᵢᵢ | E₄* | |
| 1299 | E₁ₐE₅ | AlkLEᵥᵢᵢ | E₄* | |
| 1300 | E_{1b}E₅ | AlkLEᵥᵢᵢ | E₄* | |
| 1301 | E₁ₐEᵢ | AlkLEᵥᵢᵢ | E₄* | |
| 1302 | E_{1b}Eᵢ | AlkLEᵥᵢᵢ | E₄* | |
| 1303 | E₁ₐEᵢᵢ | AlkLEᵥᵢᵢ | E₄* | |
| 1304 | E_{1b}Eᵢᵢ | AlkLEᵥᵢᵢ | E₄* | |
| 1305 | E₁ₐEᵢᵢE_{iib} | AlkLEᵥᵢᵢ | E₄* | |
| 1306 | E_{1b}EᵢᵢE_{iib} | AlkLEᵥᵢᵢ | E₄* | |
| 1307 | E₁ₐE₅Eᵢ | AlkLEᵥᵢᵢ | E₄* | |
| 1308 | E_{1b}E₅Eᵢ | AlkLEᵥᵢᵢ | E₄* | |
| 1309 | E₁ₐE₅Eᵢᵢ | AlkLEᵥᵢᵢ | E₄* | |
| 1310 | E_{1b}E₅Eᵢᵢ | AlkLEᵥᵢᵢ | E₄* | |
| 1311 | E₁ₐE₅EᵢᵢE_{iib} | AlkLEᵥᵢᵢ | E₄* | |
| 1312 | E_{1b}E₅EᵢᵢE_{iib} | AlkLEᵥᵢᵢ | E₄* | |
| 1313 | E₁ₐE₄ | AlkLEᵥᵢᵢ | E₄* | |
| 1314 | E_{1b}E₄ | AlkLEᵥᵢᵢ | E₄* | |
| 1315 | E₁ₐE₅E₄ | AlkLEᵥᵢᵢ | E₄* | |
| 1316 | E_{1b}E₅E₄ | AlkLEᵥᵢᵢ | E₄* | |
| 1317 | E₁ₐEᵢE₄ | AlkLEᵥᵢᵢ | E₄* | |
| 1318 | E_{1b}EᵢE₄ | AlkLEᵥᵢᵢ | E₄* | |
| 1319 | E₁ₐEᵢᵢE₄ | AlkLEᵥᵢᵢ | E₄* | |
| 1320 | E_{1b}EᵢᵢE₄ | AlkLEᵥᵢᵢ | E₄* | |
| 1321 | E₁ₐEᵢᵢE_{iib}E₄ | AlkLEᵥᵢᵢ | E₄* | |
| 1322 | E_{1b}EᵢᵢE_{iib}E₄ | AlkLEᵥᵢᵢ | E₄* | |
| 1323 | E₁ₐE₅EᵢE₄ | AlkLEᵥᵢᵢ | E₄* | |
| 1324 | E_{1b}E₅EᵢE₄ | AlkLEᵥᵢᵢ | E₄* | |
| 1325 | E₁ₐE₅EᵢᵢE₄ | AlkLEᵥᵢᵢ | E₄* | |
| 1326 | E_{1b}E₅EᵢᵢE₄ | AlkLEᵥᵢᵢ | E₄* | |
| 1327 | E₁ₐE₅EᵢᵢE_{iib}E₄ | AlkLEᵥᵢᵢ | E₄* | |
| 1328 | E_{1b}E₅EᵢᵢE_{iib}E₄ | AlkLEᵥᵢᵢ | E₄* | |
| 1329 | E₁ₐEᵢᵢᵢ | AlkLEᵥᵢᵢ | E₄* | |
| 1330 | E_{1b}Eᵢᵢᵢ | AlkLEᵥᵢᵢ | E₄* | |
| 1331 | E₁ₐE₅Eᵢᵢᵢ | AlkLEᵥᵢᵢ | E₄* | |
| 1332 | E_{1b}E₅Eᵢᵢᵢ | AlkLEᵥᵢᵢ | E₄* | |
| 1333 | E₁ₐEᵢᵢᵢE₄ | AlkLEᵥᵢᵢ | E₄* | |
| 1334 | E_{1b}EᵢᵢᵢE₄ | AlkLEᵥᵢᵢ | E₄* | |
| 1335 | E₁ₐE₅EᵢᵢᵢE₄ | AlkLEᵥᵢᵢ | E₄* | |
| 1336 | E_{1b}E₅EᵢᵢᵢE₄ | AlkLEᵥᵢᵢ | E₄* | |
| 1337 | E₁ₐEᵢᵥ | AlkLEᵥᵢᵢ | E₄* | |
| 1338 | E_{1b}Eᵢᵥ | AlkLEᵥᵢᵢ | E₄* | |
| 1339 | E₁ₐE₅Eᵢᵥ | AlkLEᵥᵢᵢ | E₄* | |
| 1340 | E_{1b}E₅Eᵢᵥ | AlkLEᵥᵢᵢ | E₄* | |
| 1341 | E₁ₐEᵢᵥE₄ | AlkLEᵥᵢᵢ | E₄* | |
| 1342 | E_{1b}EᵢᵥE₄ | AlkLEᵥᵢᵢ | E₄* | |
| 1343 | E₁ₐE₅EᵢᵥE₄ | AlkLEᵥᵢᵢ | E₄* | |
| 1344 | E_{1b}E₅EᵢᵥE₄ | AlkLEᵥᵢᵢ | E₄* | |
| 1345 | E₁ₐ | Eᵥᵢᵢ | | Eₐ |
| 1346 | E_{1b} | Eᵥᵢᵢ | | Eₐ |
| 1347 | E₁ₐE₅ | Eᵥᵢᵢ | | Eₐ |
| 1348 | E_{1b}E₅ | Eᵥᵢᵢ | | Eₐ |
| 1349 | E₁ₐEᵢ | Eᵥᵢᵢ | | Eₐ |
| 1350 | E_{1b}Eᵢ | Eᵥᵢᵢ | | Eₐ |
| 1351 | E₁ₐEᵢᵢ | Eᵥᵢᵢ | | Eₐ |
| 1352 | E_{1b}Eᵢᵢ | Eᵥᵢᵢ | | Eₐ |
| 1353 | E₁ₐEᵢᵢE_{iib} | Eᵥᵢᵢ | | Eₐ |
| 1354 | E_{1b}EᵢᵢE_{iib} | Eᵥᵢᵢ | | Eₐ |
| 1355 | E₁ₐE₅Eᵢ | Eᵥᵢᵢ | | Eₐ |
| 1356 | E_{1b}E₅Eᵢ | Eᵥᵢᵢ | | Eₐ |
| 1357 | E₁ₐE₅Eᵢᵢ | Eᵥᵢᵢ | | Eₐ |
| 1358 | E_{1b}E₅Eᵢᵢ | Eᵥᵢᵢ | | Eₐ |
| 1359 | E₁ₐE₅EᵢᵢE_{iib} | Eᵥᵢᵢ | | Eₐ |
| 1360 | E_{1b}E₅EᵢᵢE_{iib} | Eᵥᵢᵢ | | Eₐ |
| 1361 | E₁ₐE₄ | Eᵥᵢᵢ | | Eₐ |
| 1362 | E_{1b}E₄ | Eᵥᵢᵢ | | Eₐ |
| 1363 | E₁ₐE₅E₄ | Eᵥᵢᵢ | | Eₐ |
| 1364 | E_{1b}E₅E₄ | Eᵥᵢᵢ | | Eₐ |
| 1365 | E₁ₐEᵢE₄ | Eᵥᵢᵢ | | Eₐ |
| 1366 | E_{1b}EᵢE₄ | Eᵥᵢᵢ | | Eₐ |
| 1367 | E₁ₐEᵢᵢE₄ | Eᵥᵢᵢ | | Eₐ |
| 1368 | E_{1b}EᵢᵢE₄ | Eᵥᵢᵢ | | Eₐ |
| 1369 | E₁ₐEᵢᵢE_{iib}E₄ | Eᵥᵢᵢ | | Eₐ |
| 1370 | E_{1b}EᵢᵢE_{iib}E₄ | Eᵥᵢᵢ | | Eₐ |
| 1371 | E₁ₐE₅EᵢE₄ | Eᵥᵢᵢ | | Eₐ |
| 1372 | E_{1b}E₅EᵢE₄ | Eᵥᵢᵢ | | Eₐ |
| 1373 | E₁ₐE₅EᵢᵢE₄ | Eᵥᵢᵢ | | Eₐ |
| 1374 | E_{1b}E₅EᵢᵢE₄ | Eᵥᵢᵢ | | Eₐ |
| 1375 | E₁ₐE₅EᵢᵢE_{iib}E₄ | Eᵥᵢᵢ | | Eₐ |
| 1376 | E_{1b}E₅EᵢᵢE_{iib}E₄ | Eᵥᵢᵢ | | Eₐ |
| 1377 | E₁ₐEᵢᵢᵢ | Eᵥᵢᵢ | | Eₐ |
| 1378 | E_{1b}Eᵢᵢᵢ | Eᵥᵢᵢ | | Eₐ |
| 1379 | E₁ₐE₅Eᵢᵢᵢ | Eᵥᵢᵢ | | Eₐ |
| 1380 | E_{1b}E₅Eᵢᵢᵢ | Eᵥᵢᵢ | | Eₐ |
| 1381 | E₁ₐEᵢᵢᵢE₄ | Eᵥᵢᵢ | | Eₐ |
| 1382 | E_{1b}EᵢᵢᵢE₄ | Eᵥᵢᵢ | | Eₐ |
| 1383 | E₁ₐE₅EᵢᵢᵢE₄ | Eᵥᵢᵢ | | Eₐ |
| 1384 | E_{1b}E₅EᵢᵢᵢE₄ | Eᵥᵢᵢ | | Eₐ |
| 1385 | E₁ₐEᵢᵥ | Eᵥᵢᵢ | | Eₐ |
| 1386 | E_{1b}Eᵢᵥ | Eᵥᵢᵢ | | Eₐ |
| 1387 | E₁ₐE₅Eᵢᵥ | Eᵥᵢᵢ | | Eₐ |
| 1388 | E_{1b}E₅Eᵢᵥ | Eᵥᵢᵢ | | Eₐ |
| 1389 | E₁ₐEᵢᵥE₄ | Eᵥᵢᵢ | | Eₐ |
| 1390 | E_{1b}EᵢᵥE₄ | Eᵥᵢᵢ | | Eₐ |
| 1391 | E₁ₐE₅EᵢᵥE₄ | Eᵥᵢᵢ | | Eₐ |
| 1392 | E_{1b}E₅EᵢᵥE₄ | Eᵥᵢᵢ | | Eₐ |
| 1393 | E₁ₐ | Eᵥᵢᵢ | E₄* | Eₐ |
| 1394 | E_{1b} | Eᵥᵢᵢ | E₄* | Eₐ |
| 1395 | E₁ₐE₅ | Eᵥᵢᵢ | E₄* | Eₐ |
| 1396 | E_{1b}E₅ | Eᵥᵢᵢ | E₄* | Eₐ |
| 1397 | E₁ₐEᵢ | Eᵥᵢᵢ | E₄* | Eₐ |
| 1398 | E_{1b}Eᵢ | Eᵥᵢᵢ | E₄* | Eₐ |
| 1399 | E₁ₐEᵢᵢ | Eᵥᵢᵢ | E₄* | Eₐ |
| 1400 | E_{1b}Eᵢᵢ | Eᵥᵢᵢ | E₄* | Eₐ |
| 1401 | E₁ₐEᵢᵢE_{iib} | Eᵥᵢᵢ | E₄* | Eₐ |
| 1402 | E_{1b}EᵢᵢE_{iib} | Eᵥᵢᵢ | E₄* | Eₐ |
| 1403 | E₁ₐE₅Eᵢ | Eᵥᵢᵢ | E₄* | Eₐ |
| 1404 | E_{1b}E₅Eᵢ | Eᵥᵢᵢ | E₄* | Eₐ |
| 1405 | E₁ₐE₅Eᵢᵢ | Eᵥᵢᵢ | E₄* | Eₐ |
| 1406 | E_{1b}E₅Eᵢᵢ | Eᵥᵢᵢ | E₄* | Eₐ |
| 1407 | E₁ₐE₅EᵢᵢE_{iib} | Eᵥᵢᵢ | E₄* | Eₐ |
| 1408 | E_{1b}E₅EᵢᵢE_{iib} | Eᵥᵢᵢ | E₄* | Eₐ |
| 1409 | E₁ₐE₄ | Eᵥᵢᵢ | E₄* | Eₐ |
| 1410 | E_{1b}E₄ | Eᵥᵢᵢ | E₄* | Eₐ |
| 1411 | E₁ₐE₅E₄ | Eᵥᵢᵢ | E₄* | Eₐ |
| 1412 | E_{1b}E₅E₄ | Eᵥᵢᵢ | E₄* | Eₐ |
| 1413 | E₁ₐEᵢE₄ | Eᵥᵢᵢ | E₄* | Eₐ |
| 1414 | E_{1b}EᵢE₄ | Eᵥᵢᵢ | E₄* | Eₐ |
| 1415 | E₁ₐEᵢᵢE₄ | Eᵥᵢᵢ | E₄* | Eₐ |
| 1416 | E_{1b}EᵢᵢE₄ | Eᵥᵢᵢ | E₄* | Eₐ |
| 1417 | E₁ₐEᵢᵢE_{iib}E₄ | Eᵥᵢᵢ | E₄* | Eₐ |
| 1418 | E_{1b}EᵢᵢE_{iib}E₄ | Eᵥᵢᵢ | E₄* | Eₐ |
| 1419 | E₁ₐE₅EᵢE₄ | Eᵥᵢᵢ | E₄* | Eₐ |
| 1420 | E_{1b}E₅EᵢE₄ | Eᵥᵢᵢ | E₄* | Eₐ |
| 1421 | E₁ₐE₅EᵢᵢE₄ | Eᵥᵢᵢ | E₄* | Eₐ |
| 1422 | E_{1b}E₅EᵢᵢE₄ | Eᵥᵢᵢ | E₄* | Eₐ |
| 1423 | E₁ₐE₅EᵢᵢE_{iib}E₄ | Eᵥᵢᵢ | E₄* | Eₐ |
| 1424 | E_{1b}E₅EᵢᵢE_{iib}E₄ | Eᵥᵢᵢ | E₄* | Eₐ |
| 1425 | E₁ₐEᵢᵢᵢ | Eᵥᵢᵢ | E₄* | Eₐ |
| 1426 | E_{1b}Eᵢᵢᵢ | Eᵥᵢᵢ | E₄* | Eₐ |
| 1427 | E₁ₐE₅Eᵢᵢᵢ | Eᵥᵢᵢ | E₄* | Eₐ |
| 1428 | E_{1b}E₅Eᵢᵢᵢ | Eᵥᵢᵢ | E₄* | Eₐ |
| 1429 | E₁ₐEᵢᵢᵢE₄ | Eᵥᵢᵢ | E₄* | Eₐ |
| 1430 | E_{1b}EᵢᵢᵢE₄ | Eᵥᵢᵢ | E₄* | Eₐ |
| 1431 | E₁ₐE₅EᵢᵢᵢE₄ | Eᵥᵢᵢ | E₄* | Eₐ |
| 1432 | E_{1b}E₅EᵢᵢᵢE₄ | Eᵥᵢᵢ | E₄* | Eₐ |
| 1433 | E₁ₐEᵢᵥ | Eᵥᵢᵢ | E₄* | Eₐ |
| 1434 | E_{1b}Eᵢᵥ | Eᵥᵢᵢ | E₄* | Eₐ |
| 1435 | E₁ₐE₅Eᵢᵥ | Eᵥᵢᵢ | E₄* | Eₐ |
| 1436 | E_{1b}E₅Eᵢᵥ | Eᵥᵢᵢ | E₄* | Eₐ |
| 1437 | E₁ₐEᵢᵥE₄ | Eᵥᵢᵢ | E₄* | Eₐ |
| 1438 | E_{1b}EᵢᵥE₄ | Eᵥᵢᵢ | E₄* | Eₐ |
| 1439 | E₁ₐE₅EᵢᵥE₄ | Eᵥᵢᵢ | E₄* | Eₐ |
| 1440 | E_{1b}E₅EᵢᵥE₄ | Eᵥᵢᵢ | E₄* | Eₐ |
| 1441 | E₁ₐ | AlkLEᵥᵢᵢ | | Eₐ |
| 1442 | E_{1b} | AlkLEᵥᵢᵢ | | Eₐ |
| 1443 | E₁ₐE₅ | AlkLEᵥᵢᵢ | | Eₐ |
| 1444 | E_{1b}E₅ | AlkLEᵥᵢᵢ | | Eₐ |
| 1445 | E₁ₐEᵢ | AlkLEᵥᵢᵢ | | Eₐ |
| 1446 | E_{1b}Eᵢ | AlkLEᵥᵢᵢ | | Eₐ |
| 1447 | E₁ₐEᵢᵢ | AlkLEᵥᵢᵢ | | Eₐ |
| 1448 | E_{1b}Eᵢᵢ | AlkLEᵥᵢᵢ | | Eₐ |
| 1449 | E₁ₐEᵢᵢE_{iib} | AlkLEᵥᵢᵢ | | Eₐ |
| 1450 | E_{1b}EᵢᵢE_{iib} | AlkLEᵥᵢᵢ | | Eₐ |
| 1451 | E₁ₐE₅Eᵢ | AlkLEᵥᵢᵢ | | Eₐ |
| 1452 | E_{1b}E₅Eᵢ | AlkLEᵥᵢᵢ | | Eₐ |
| 1453 | E₁ₐE₅Eᵢᵢ | AlkLEᵥᵢᵢ | | Eₐ |
| 1454 | E_{1b}E₅Eᵢᵢ | AlkLEᵥᵢᵢ | | Eₐ |
| 1455 | E₁ₐE₅EᵢᵢE_{iib} | AlkLEᵥᵢᵢ | | Eₐ |
| 1456 | E_{1b}E₅EᵢᵢE_{iib} | AlkLEᵥᵢᵢ | | Eₐ |
| 1457 | E₁ₐE₄ | AlkLEᵥᵢᵢ | | Eₐ |
| 1458 | E_{1b}E₄ | AlkLEᵥᵢᵢ | | Eₐ |
| 1459 | E₁ₐE₅E₄ | AlkLEᵥᵢᵢ | | Eₐ |
| 1460 | E_{1b}E₅E₄ | AlkLEᵥᵢᵢ | | Eₐ |
| 1461 | E₁ₐEᵢE₄ | AlkLEᵥᵢᵢ | | Eₐ |
| 1462 | E_{1b}EᵢE₄ | AlkLEᵥᵢᵢ | | Eₐ |
| 1463 | E₁ₐEᵢᵢE₄ | AlkLEᵥᵢᵢ | | Eₐ |
| 1464 | E_{1b}EᵢᵢE₄ | AlkLEᵥᵢᵢ | | Eₐ |
| 1465 | E₁ₐEᵢᵢE_{iib}E₄ | AlkLEᵥᵢᵢ | | Eₐ |
| 1466 | E_{1b}EᵢᵢE_{iib}E₄ | AlkLEᵥᵢᵢ | | Eₐ |
| 1467 | E₁ₐE₅EᵢE₄ | AlkLEᵥᵢᵢ | | Eₐ |
| 1468 | E_{1b}E₅EᵢE₄ | AlkLEᵥᵢᵢ | | Eₐ |
| 1469 | E₁ₐE₅EᵢᵢE₄ | AlkLEᵥᵢᵢ | | Eₐ |
| 1470 | E_{1b}E₅EᵢᵢE₄ | AlkLEᵥᵢᵢ | | Eₐ |
| 1471 | E₁ₐE₅EᵢᵢE_{iib}E₄ | AlkLEᵥᵢᵢ | | Eₐ |
| 1472 | E_{1b}E₅EᵢᵢE_{iib}E₄ | AlkLEᵥᵢᵢ | | Eₐ |
| 1473 | E₁ₐEᵢᵢᵢ | AlkLEᵥᵢᵢ | | Eₐ |
| 1474 | E_{1b}Eᵢᵢᵢ | AlkLEᵥᵢᵢ | | Eₐ |
| 1475 | E₁ₐE₅Eᵢᵢᵢ | AlkLEᵥᵢᵢ | | Eₐ |
| 1476 | E_{1b}E₅Eᵢᵢᵢ | AlkLEᵥᵢᵢ | | Eₐ |
| 1477 | E₁ₐEᵢᵢᵢE₄ | AlkLEᵥᵢᵢ | | Eₐ |
| 1478 | E_{1b}EᵢᵢᵢE₄ | AlkLEᵥᵢᵢ | | Eₐ |
| 1479 | E₁ₐE₅EᵢᵢᵢE₄ | AlkLEᵥᵢᵢ | | Eₐ |
| 1480 | E_{1b}E₅EᵢᵢᵢE₄ | AlkLEᵥᵢᵢ | | Eₐ |
| 1481 | E₁ₐEᵢᵥ | AlkLEᵥᵢᵢ | | Eₐ |
| 1482 | E_{1b}Eᵢᵥ | AlkLEᵥᵢᵢ | | Eₐ |
| 1483 | E₁ₐE₅Eᵢᵥ | AlkLEᵥᵢᵢ | | Eₐ |
| 1484 | E_{1b}E₅Eᵢᵥ | AlkLEᵥᵢᵢ | | Eₐ |
| 1485 | E₁ₐEᵢᵥE₄ | AlkLEᵥᵢᵢ | | Eₐ |
| 1486 | E_{1b}EᵢᵥE₄ | AlkLEᵥᵢᵢ | | Eₐ |
| 1487 | E₁ₐE₅EᵢᵥE₄ | AlkLEᵥᵢᵢ | | Eₐ |
| 1488 | E_{1b}E₅EᵢᵥE₄ | AlkLEᵥᵢᵢ | | Eₐ |
| 1489 | E₁ₐ | AlkLEᵥᵢᵢ | E₄* | Eₐ |
| 1490 | E_{1b} | AlkLEᵥᵢᵢ | E₄* | Eₐ |
| 1491 | E₁ₐE₅ | AlkLEᵥᵢᵢ | E₄* | Eₐ |
| 1492 | E_{1b}E₅ | AlkLEᵥᵢᵢ | E₄* | Eₐ |
| 1493 | E₁ₐEᵢ | AlkLEᵥᵢᵢ | E₄* | Eₐ |
| 1494 | E_{1b}Eᵢ | AlkLEᵥᵢᵢ | E₄* | Eₐ |
| 1495 | E₁ₐEᵢᵢ | AlkLEᵥᵢᵢ | E₄* | Eₐ |
| 1496 | E_{1b}Eᵢᵢ | AlkLEᵥᵢᵢ | E₄* | Eₐ |
| 1497 | E₁ₐEᵢᵢE_{iib} | AlkLEᵥᵢᵢ | E₄* | Eₐ |
| 1498 | E_{1b}EᵢᵢE_{iib} | AlkLEᵥᵢᵢ | E₄* | Eₐ |
| 1499 | E₁ₐE₅Eᵢ | AlkLEᵥᵢᵢ | E₄* | Eₐ |
| 1500 | E_{1b}E₅Eᵢ | AlkLEᵥᵢᵢ | E₄* | Eₐ |
| 1501 | E₁ₐE₅Eᵢᵢ | AlkLEᵥᵢᵢ | E₄* | Eₐ |
| 1502 | E_{1b}E₅Eᵢᵢ | AlkLEᵥᵢᵢ | E₄* | Eₐ |
| 1503 | E₁ₐE₅EᵢᵢE_{iib} | AlkLEᵥᵢᵢ | E₄* | Eₐ |
| 1504 | E_{1b}E₅EᵢᵢE_{iib} | AlkLEᵥᵢᵢ | E₄* | Eₐ |
| 1505 | E₁ₐE₄ | AlkLEᵥᵢᵢ | E₄* | Eₐ |
| 1506 | E_{1b}E₄ | AlkLEᵥᵢᵢ | E₄* | Eₐ |
| 1507 | E₁ₐE₅E₄ | AlkLEᵥᵢᵢ | E₄* | Eₐ |
| 1508 | E_{1b}E₅E₄ | AlkLEᵥᵢᵢ | E₄* | Eₐ |
| 1509 | E₁ₐEᵢE₄ | AlkLEᵥᵢᵢ | E₄* | Eₐ |
| 1510 | E_{1b}EᵢE₄ | AlkLEᵥᵢᵢ | E₄* | Eₐ |
| 1511 | E₁ₐEᵢᵢE₄ | AlkLEᵥᵢᵢ | E₄* | Eₐ |
| 1512 | E_{1b}EᵢᵢE₄ | AlkLEᵥᵢᵢ | E₄* | Eₐ |
| 1513 | E₁ₐEᵢᵢE_{iib}E₄ | AlkLEᵥᵢᵢ | E₄* | Eₐ |
| 1514 | E_{1b}EᵢᵢE_{iib}E₄ | AlkLEᵥᵢᵢ | E₄* | Eₐ |
| 1515 | E₁ₐE₅EᵢE₄ | AlkLEᵥᵢᵢ | E₄* | Eₐ |
| 1516 | E_{1b}E₅EᵢE₄ | AlkLEᵥᵢᵢ | E₄* | Eₐ |
| 1517 | E₁ₐE₅EᵢᵢE₄ | AlkLEᵥᵢᵢ | E₄* | Eₐ |
| 1518 | E_{1b}E₅EᵢᵢE₄ | AlkLEᵥᵢᵢ | E₄* | Eₐ |
| 1519 | E₁ₐE₅EᵢᵢE_{iib}E₄ | AlkLEᵥᵢᵢ | E₄* | Eₐ |
| 1520 | E_{1b}E₅EᵢᵢE_{iib}E₄ | AlkLEᵥᵢᵢ | E₄* | Eₐ |
| 1521 | E₁ₐEᵢᵢᵢ | AlkLEᵥᵢᵢ | E₄* | Eₐ |
| 1522 | E_{1b}Eᵢᵢᵢ | AlkLEᵥᵢᵢ | E₄* | Eₐ |
| 1523 | E₁ₐE₅Eᵢᵢᵢ | AlkLEᵥᵢᵢ | E₄* | Eₐ |
| 1524 | E_{1b}E₅Eᵢᵢᵢ | AlkLEᵥᵢᵢ | E₄* | Eₐ |
| 1525 | E₁ₐEᵢᵢᵢE₄ | AlkLEᵥᵢᵢ | E₄* | Eₐ |
| 1526 | E_{1b}EᵢᵢᵢE₄ | AlkLEᵥᵢᵢ | E₄* | Eₐ |
| 1527 | E₁ₐE₅EᵢᵢᵢE₄ | AlkLEᵥᵢᵢ | E₄* | Eₐ |
| 1528 | E_{1b}E₅EᵢᵢᵢE₄ | AlkLEᵥᵢᵢ | E₄* | Eₐ |
| 1529 | E₁ₐEᵢᵥ | AlkLEᵥᵢᵢ | E₄* | Eₐ |
| 1530 | E_{1b}Eᵢᵥ | AlkLEᵥᵢᵢ | E₄* | Eₐ |
| 1531 | E₁ₐE₅Eᵢᵥ | AlkLEᵥᵢᵢ | E₄* | Eₐ |
| 1532 | E_{1b}E₅Eᵢᵥ | AlkLEᵥᵢᵢ | E₄* | Eₐ |
| 1533 | E₁ₐEᵢᵥE₄ | AlkLEᵥᵢᵢ | E₄* | Eₐ |
| 1534 | E_{1b}EᵢᵥE₄ | AlkLEᵥᵢᵢ | E₄* | Eₐ |
| 1535 | E₁ₐE₅EᵢᵥE₄ | AlkLEᵥᵢᵢ | E₄* | Eₐ |
| 1536 | E_{1b}E₅EᵢᵥE₄ | AlkLEᵥᵢᵢ | E₄* | Eₐ |
| 1537 | E₁ₐ | Eᵥᵢᵢ | | E_{b} |
| 1538 | E_{1b} | Eᵥᵢᵢ | | E_{b} |
| 1539 | E₁ₐE₅ | Eᵥᵢᵢ | | E_{b} |
| 1540 | E_{1b}E₅ | Eᵥᵢᵢ | | E_{b} |
| 1541 | E₁ₐEᵢ | Eᵥᵢᵢ | | E_{b} |
| 1542 | E_{1b}Eᵢ | Eᵥᵢᵢ | | E_{b} |
| 1543 | E₁ₐEᵢᵢ | Eᵥᵢᵢ | | E_{b} |
| 1544 | E_{1b}Eᵢᵢ | Eᵥᵢᵢ | | E_{b} |
| 1545 | E₁ₐEᵢᵢE_{iib} | Eᵥᵢᵢ | | E_{b} |
| 1546 | E_{1b}EᵢᵢE_{iib} | Eᵥᵢᵢ | | E_{b} |
| 1547 | E₁ₐE₅Eᵢ | Eᵥᵢᵢ | | E_{b} |
| 1548 | E_{1b}E₅Eᵢ | Eᵥᵢᵢ | | E_{b} |
| 1549 | E₁ₐE₅Eᵢᵢ | Eᵥᵢᵢ | | E_{b} |
| 1550 | E_{1b}E₅Eᵢᵢ | Eᵥᵢᵢ | | E_{b} |
| 1551 | E₁ₐE₅EᵢᵢE_{iib} | Eᵥᵢᵢ | | E_{b} |
| 1552 | E_{1b}E₅EᵢᵢE_{iib} | Eᵥᵢᵢ | | E_{b} |
| 1553 | E₁ₐE₄ | Eᵥᵢᵢ | | E_{b} |
| 1554 | E_{1b}E₄ | Eᵥᵢᵢ | | E_{b} |
| 1555 | E₁ₐE₅E₄ | Eᵥᵢᵢ | | E_{b} |
| 1556 | E_{1b}E₅E₄ | Eᵥᵢᵢ | | E_{b} |
| 1557 | E₁ₐEᵢE₄ | Eᵥᵢᵢ | | E_{b} |
| 1558 | E_{1b}EᵢE₄ | Eᵥᵢᵢ | | E_{b} |
| 1559 | E₁ₐEᵢᵢE₄ | Eᵥᵢᵢ | | E_{b} |
| 1560 | E_{1b}EᵢᵢE₄ | Eᵥᵢᵢ | | E_{b} |
| 1561 | E₁ₐEᵢᵢE_{iib}E₄ | Eᵥᵢᵢ | | E_{b} |
| 1562 | E_{1b}EᵢᵢE_{iib}E₄ | Eᵥᵢᵢ | | E_{b} |
| 1563 | E₁ₐE₅EᵢE₄ | Eᵥᵢᵢ | | E_{b} |
| 1564 | E_{1b}E₅EᵢE₄ | Eᵥᵢᵢ | | E_{b} |
| 1565 | E₁ₐE₅EᵢᵢE₄ | Eᵥᵢᵢ | | E_{b} |
| 1566 | E_{1b}E₅EᵢᵢE₄ | Eᵥᵢᵢ | | E_{b} |
| 1567 | E₁ₐE₅EᵢᵢE_{iib}E₄ | Eᵥᵢᵢ | | E_{b} |
| 1568 | E_{1b}E₅EᵢᵢE_{iib}E₄ | Eᵥᵢᵢ | | E_{b} |
| 1569 | E₁ₐEᵢᵢᵢ | Eᵥᵢᵢ | | E_{b} |
| 1570 | E_{1b}Eᵢᵢᵢ | Eᵥᵢᵢ | | E_{b} |
| 1571 | E₁ₐE₅Eᵢᵢᵢ | Eᵥᵢᵢ | | E_{b} |
| 1572 | E_{1b}E₅Eᵢᵢᵢ | Eᵥᵢᵢ | | E_{b} |
| 1573 | E₁ₐEᵢᵢᵢE₄ | Eᵥᵢᵢ | | E_{b} |
| 1574 | E_{1b}EᵢᵢᵢE₄ | Eᵥᵢᵢ | | E_{b} |
| 1575 | E₁ₐE₅EᵢᵢᵢE₄ | Eᵥᵢᵢ | | E_{b} |
| 1576 | E_{1b}E₅EᵢᵢᵢE₄ | Eᵥᵢᵢ | | E_{b} |
| 1577 | E₁ₐEᵢᵥ | Eᵥᵢᵢ | | E_{b} |
| 1578 | E_{1b}Eᵢᵥ | Eᵥᵢᵢ | | E_{b} |
| 1579 | E₁ₐE₅Eᵢᵥ | Eᵥᵢᵢ | | E_{b} |
| 1580 | E_{1b}E₅Eᵢᵥ | Eᵥᵢᵢ | | E_{b} |
| 1581 | E₁ₐEᵢᵥE₄ | Eᵥᵢᵢ | | E_{b} |
| 1582 | E_{1b}EᵢᵥE₄ | Eᵥᵢᵢ | | E_{b} |
| 1583 | E₁ₐE₅EᵢᵥE₄ | Eᵥᵢᵢ | | E_{b} |
| 1584 | E_{1b}E₅EᵢᵥE₄ | Eᵥᵢᵢ | | E_{b} |
| 1585 | E₁ₐ | Eᵥᵢᵢ | E₄* | E_{b} |
| 1586 | E_{1b} | Eᵥᵢᵢ | E₄* | E_{b} |
| 1587 | E₁ₐE₅ | Eᵥᵢᵢ | E₄* | E_{b} |
| 1588 | E_{1b}E₅ | Eᵥᵢᵢ | E₄* | E_{b} |
| 1589 | E₁ₐEᵢ | Eᵥᵢᵢ | E₄* | E_{b} |
| 1590 | E_{1b}Eᵢ | Eᵥᵢᵢ | E₄* | E_{b} |
| 1591 | E₁ₐEᵢᵢ | Eᵥᵢᵢ | E₄* | E_{b} |
| 1592 | E_{1b}Eᵢᵢ | Eᵥᵢᵢ | E₄* | E_{b} |
| 1593 | E₁ₐEᵢᵢE_{iib} | Eᵥᵢᵢ | E₄* | E_{b} |
| 1594 | E_{1b}EᵢᵢE_{iib} | Eᵥᵢᵢ | E₄* | E_{b} |
| 1595 | E₁ₐE₅Eᵢ | Eᵥᵢᵢ | E₄* | E_{b} |
| 1596 | E_{1b}E₅Eᵢ | Eᵥᵢᵢ | E₄* | E_{b} |
| 1597 | E₁ₐE₅Eᵢᵢ | Eᵥᵢᵢ | E₄* | E_{b} |
| 1598 | E_{1b}E₅Eᵢᵢ | Eᵥᵢᵢ | E₄* | E_{b} |
| 1599 | E₁ₐE₅EᵢᵢE_{iib} | Eᵥᵢᵢ | E₄* | E_{b} |
| 1600 | E_{1b}E₅EᵢᵢE_{iib} | Eᵥᵢᵢ | E₄* | E_{b} |
| 1601 | E₁ₐE₄ | Eᵥᵢᵢ | E₄* | E_{b} |
| 1602 | E_{1b}E₄ | Eᵥᵢᵢ | E₄* | E_{b} |
| 1603 | E₁ₐE₅E₄ | Eᵥᵢᵢ | E₄* | E_{b} |
| 1604 | E_{1b}E₅E₄ | Eᵥᵢᵢ | E₄* | E_{b} |
| 1605 | E₁ₐEᵢE₄ | Eᵥᵢᵢ | E₄* | E_{b} |
| 1606 | E_{1b}EᵢE₄ | Eᵥᵢᵢ | E₄* | E_{b} |
| 1607 | E₁ₐEᵢᵢE₄ | Eᵥᵢᵢ | E₄* | E_{b} |
| 1608 | E_{1b}EᵢᵢE₄ | Eᵥᵢᵢ | E₄* | E_{b} |
| 1609 | E₁ₐEᵢᵢE_{iib}E₄ | Eᵥᵢᵢ | E₄* | E_{b} |
| 1610 | E_{1b}EᵢᵢE_{iib}E₄ | Eᵥᵢᵢ | E₄* | E_{b} |
| 1611 | E₁ₐE₅EᵢE₄ | Eᵥᵢᵢ | E₄* | E_{b} |
| 1612 | E_{1b}E₅EᵢE₄ | Eᵥᵢᵢ | E₄* | E_{b} |
| 1613 | E₁ₐE₅EᵢᵢE₄ | Eᵥᵢᵢ | E₄* | E_{b} |
| 1614 | E_{1b}E₅EᵢᵢE₄ | Eᵥᵢᵢ | E₄* | E_{b} |
| 1615 | E₁ₐE₅EᵢᵢE_{iib}E₄ | Eᵥᵢᵢ | E₄* | E_{b} |
| 1616 | E_{1b}E₅EᵢᵢE_{iib}E₄ | Eᵥᵢᵢ | E₄* | E_{b} |
| 1617 | E₁ₐEᵢᵢᵢ | Eᵥᵢᵢ | E₄* | E_{b} |
| 1618 | E_{1b}Eᵢᵢᵢ | Eᵥᵢᵢ | E₄* | E_{b} |
| 1619 | E₁ₐE₅Eᵢᵢᵢ | Eᵥᵢᵢ | E₄* | E_{b} |
| 1620 | E_{1b}E₅Eᵢᵢᵢ | Eᵥᵢᵢ | E₄* | E_{b} |
| 1621 | E₁ₐEᵢᵢᵢE₄ | Eᵥᵢᵢ | E₄* | E_{b} |
| 1622 | E_{1b}EᵢᵢᵢE₄ | Eᵥᵢᵢ | E₄* | E_{b} |
| 1623 | E₁ₐE₅EᵢᵢᵢE₄ | Eᵥᵢᵢ | E₄* | E_{b} |
| 1624 | E_{1b}E₅EᵢᵢᵢE₄ | Eᵥᵢᵢ | E₄* | E_{b} |
| 1625 | E₁ₐEᵢᵥ | Eᵥᵢᵢ | E₄* | E_{b} |
| 1626 | E_{1b}Eᵢᵥ | Eᵥᵢᵢ | E₄* | E_{b} |
| 1627 | E₁ₐE₅Eᵢᵥ | Eᵥᵢᵢ | E₄* | E_{b} |
| 1628 | E_{1b}E₅Eᵢᵥ | Eᵥᵢᵢ | E₄* | E_{b} |
| 1629 | E₁ₐEᵢᵥE₄ | Eᵥᵢᵢ | E₄* | E_{b} |
| 1630 | E_{1b}EᵢᵥE₄ | Eᵥᵢᵢ | E₄* | E_{b} |
| 1631 | E₁ₐE₅EᵢᵥE₄ | Eᵥᵢᵢ | E₄* | E_{b} |
| 1632 | E_{1b}E₅EᵢᵥE₄ | Eᵥᵢᵢ | E₄* | E_{b} |
| 1633 | E₁ₐ | AlkLEᵥᵢᵢ | | E_{b} |
| 1634 | E_{1b} | AlkLEᵥᵢᵢ | | E_{b} |
| 1635 | E₁ₐE₅ | AlkLEᵥᵢᵢ | | E_{b} |
| 1636 | E_{1b}E₅ | AlkLEᵥᵢᵢ | | E_{b} |
| 1637 | E₁ₐEᵢ | AlkLEᵥᵢᵢ | | E_{b} |
| 1638 | E_{1b}Eᵢ | AlkLEᵥᵢᵢ | | E_{b} |
| 1639 | E₁ₐEᵢᵢ | AlkLEᵥᵢᵢ | | E_{b} |
| 1640 | E_{1b}Eᵢᵢ | AlkLEᵥᵢᵢ | | E_{b} |
| 1641 | E₁ₐEᵢᵢE_{iib} | AlkLEᵥᵢᵢ | | E_{b} |
| 1642 | E_{1b}EᵢᵢE_{iib} | AlkLEᵥᵢᵢ | | E_{b} |
| 1643 | E₁ₐE₅Eᵢ | AlkLEᵥᵢᵢ | | E_{b} |
| 1644 | E_{1b}E₅Eᵢ | AlkLEᵥᵢᵢ | | E_{b} |
| 1645 | E₁ₐE₅Eᵢᵢ | AlkLEᵥᵢᵢ | | E_{b} |
| 1646 | E_{1b}E₅Eᵢᵢ | AlkLEᵥᵢᵢ | | E_{b} |
| 1647 | E₁ₐE₅EᵢᵢE_{iib} | AlkLEᵥᵢᵢ | | E_{b} |
| 1648 | E_{1b}E₅EᵢᵢE_{iib} | AlkLEᵥᵢᵢ | | E_{b} |
| 1649 | E₁ₐE₄ | AlkLEᵥᵢᵢ | | E_{b} |
| 1650 | E_{1b}E₄ | AlkLEᵥᵢᵢ | | E_{b} |
| 1651 | E₁ₐE₅E₄ | AlkLEᵥᵢᵢ | | E_{b} |
| 1652 | E_{1b}E₅E₄ | AlkLEᵥᵢᵢ | | E_{b} |
| 1653 | E₁ₐEᵢE₄ | AlkLEᵥᵢᵢ | | E_{b} |
| 1654 | E_{1b}EᵢE₄ | AlkLEᵥᵢᵢ | | E_{b} |
| 1655 | E₁ₐEᵢᵢE₄ | AlkLEᵥᵢᵢ | | E_{b} |
| 1656 | E_{1b}EᵢᵢE₄ | AlkLEᵥᵢᵢ | | E_{b} |
| 1657 | E₁ₐEᵢᵢE_{iib}E₄ | AlkLEᵥᵢᵢ | | E_{b} |
| 1658 | E_{1b}EᵢᵢE_{iib}E₄ | AlkLEᵥᵢᵢ | | E_{b} |
| 1659 | E₁ₐE₅EᵢE₄ | AlkLEᵥᵢᵢ | | E_{b} |
| 1660 | E_{1b}E₅EᵢE₄ | AlkLEᵥᵢᵢ | | E_{b} |
| 1661 | E₁ₐE₅EᵢᵢE₄ | AlkLEᵥᵢᵢ | | E_{b} |
| 1662 | E_{1b}E₅EᵢᵢE₄ | AlkLEᵥᵢᵢ | | E_{b} |
| 1663 | E₁ₐE₅EᵢᵢE_{iib}E₄ | AlkLEᵥᵢᵢ | | E_{b} |
| 1664 | E_{1b}E₅EᵢᵢE_{iib}E₄ | AlkLEᵥᵢᵢ | | E_{b} |
| 1665 | E₁ₐEᵢᵢᵢ | AlkLEᵥᵢᵢ | | E_{b} |
| 1666 | E_{1b}Eᵢᵢᵢ | AlkLEᵥᵢᵢ | | E_{b} |
| 1667 | E₁ₐE₅Eᵢᵢᵢ | AlkLEᵥᵢᵢ | | E_{b} |
| 1668 | E_{1b}E₅Eᵢᵢᵢ | AlkLEᵥᵢᵢ | | E_{b} |
| 1669 | E₁ₐEᵢᵢᵢE₄ | AlkLEᵥᵢᵢ | | E_{b} |
| 1670 | E_{1b}EᵢᵢᵢE₄ | AlkLEᵥᵢᵢ | | E_{b} |
| 1671 | E₁ₐE₅EᵢᵢᵢE₄ | AlkLEᵥᵢᵢ | | E_{b} |
| 1672 | E_{1b}E₅EᵢᵢᵢE₄ | AlkLEᵥᵢᵢ | | E_{b} |
| 1673 | E₁ₐEᵢᵥ | AlkLEᵥᵢᵢ | | E_{b} |
| 1674 | E_{1b}Eᵢᵥ | AlkLEᵥᵢᵢ | | E_{b} |
| 1675 | E₁ₐE₅Eᵢᵥ | AlkLEᵥᵢᵢ | | E_{b} |
| 1676 | E_{1b}E₅Eᵢᵥ | AlkLEᵥᵢᵢ | | E_{b} |
| 1677 | E₁ₐEᵢᵥE₄ | AlkLEᵥᵢᵢ | | E_{b} |
| 1678 | E_{1b}EᵢᵥE₄ | AlkLEᵥᵢᵢ | | E_{b} |
| 1679 | E₁ₐE₅EᵢᵥE₄ | AlkLEᵥᵢᵢ | | E_{b} |
| 1680 | E_{1b}E₅EᵢᵥE₄ | AlkLEᵥᵢᵢ | | E_{b} |
| 1681 | E₁ₐ | AlkLEᵥᵢᵢ | E₄* | E_{b} |
| 1682 | E_{1b} | AlkLEᵥᵢᵢ | E₄* | E_{b} |
| 1683 | E₁ₐE₅ | AlkLEᵥᵢᵢ | E₄* | E_{b} |
| 1684 | E_{1b}E₅ | AlkLEᵥᵢᵢ | E₄* | E_{b} |
| 1685 | E₁ₐEᵢ | AlkLEᵥᵢᵢ | E₄* | E_{b} |
| 1686 | E_{1b}Eᵢ | AlkLEᵥᵢᵢ | E₄* | E_{b} |
| 1687 | E₁ₐEᵢᵢ | AlkLEᵥᵢᵢ | E₄* | E_{b} |
| 1688 | E_{1b}Eᵢᵢ | AlkLEᵥᵢᵢ | E₄* | E_{b} |
| 1689 | E₁ₐEᵢᵢE_{iib} | AlkLEᵥᵢᵢ | E₄* | E_{b} |
| 1690 | E_{1b}EᵢᵢE_{iib} | AlkLEᵥᵢᵢ | E₄* | E_{b} |
| 1691 | E₁ₐE₅Eᵢ | AlkLEᵥᵢᵢ | E₄* | E_{b} |
| 1692 | E_{1b}E₅Eᵢ | AlkLEᵥᵢᵢ | E₄* | E_{b} |
| 1693 | E₁ₐE₅Eᵢᵢ | AlkLEᵥᵢᵢ | E₄* | E_{b} |
| 1694 | E_{1b}E₅Eᵢᵢ | AlkLEᵥᵢᵢ | E₄* | E_{b} |
| 1695 | E₁ₐE₅EᵢᵢE_{iib} | AlkLEᵥᵢᵢ | E₄* | E_{b} |
| 1696 | E_{1b}E₅EᵢᵢE_{iib} | AlkLEᵥᵢᵢ | E₄* | E_{b} |
| 1697 | E₁ₐE₄ | AlkLEᵥᵢᵢ | E₄* | E_{b} |
| 1698 | E_{1b}E₄ | AlkLEᵥᵢᵢ | E₄* | E_{b} |
| 1699 | E₁ₐE₅E₄ | AlkLEᵥᵢᵢ | E₄* | E_{b} |
| 1700 | E_{1b}E₅E₄ | AlkLEᵥᵢᵢ | E₄* | E_{b} |
| 1701 | E₁ₐEᵢE₄ | AlkLEᵥᵢᵢ | E₄* | E_{b} |
| 1702 | E_{1b}EᵢE₄ | AlkLEᵥᵢᵢ | E₄* | E_{b} |
| 1703 | E₁ₐEᵢᵢE₄ | AlkLEᵥᵢᵢ | E₄* | E_{b} |
| 1704 | E_{1b}EᵢᵢE₄ | AlkLEᵥᵢᵢ | E₄* | E_{b} |
| 1705 | E₁ₐEᵢᵢE_{iib}E₄ | AlkLEᵥᵢᵢ | E₄* | E_{b} |
| 1706 | E_{1b}EᵢᵢE_{iib}E₄ | AlkLEᵥᵢᵢ | E₄* | E_{b} |
| 1707 | E₁ₐE₅EᵢE₄ | AlkLEᵥᵢᵢ | E₄* | E_{b} |
| 1708 | E_{1b}E₅EᵢE₄ | AlkLEᵥᵢᵢ | E₄* | E_{b} |
| 1709 | E₁ₐE₅EᵢᵢE₄ | AlkLEᵥᵢᵢ | E₄* | E_{b} |
| 1710 | E_{1b}E₅EᵢᵢE₄ | AlkLEᵥᵢᵢ | E₄* | E_{b} |
| 1711 | E₁ₐE₅EᵢᵢE_{iib}E₄ | AlkLEᵥᵢᵢ | E₄* | E_{b} |
| 1712 | E_{1b}E₅EᵢᵢE_{iib}E₄ | AlkLEᵥᵢᵢ | E₄* | E_{b} |
| 1713 | E₁ₐEᵢᵢᵢ | AlkLEᵥᵢᵢ | E₄* | E_{b} |
| 1714 | E_{1b}Eᵢᵢᵢ | AlkLEᵥᵢᵢ | E₄* | E_{b} |
| 1715 | E₁ₐE₅Eᵢᵢᵢ | AlkLEᵥᵢᵢ | E₄* | E_{b} |
| 1716 | E_{1b}E₅Eᵢᵢᵢ | AlkLEᵥᵢᵢ | E₄* | E_{b} |
| 1717 | E₁ₐEᵢᵢᵢE₄ | AlkLEᵥᵢᵢ | E₄* | E_{b} |
| 1718 | E_{1b}EᵢᵢᵢE₄ | AlkLEᵥᵢᵢ | E₄* | E_{b} |
| 1719 | E₁ₐE₅EᵢᵢᵢE₄ | AlkLEᵥᵢᵢ | E₄* | E_{b} |
| 1720 | E_{1b}E₅EᵢᵢᵢE₄ | AlkLEᵥᵢᵢ | E₄* | E_{b} |
| 1721 | E₁ₐEᵢᵥ | AlkLEᵥᵢᵢ | E₄* | E_{b} |
| 1722 | E_{1b}Eᵢᵥ | AlkLEᵥᵢᵢ | E₄* | E_{b} |
| 1723 | E₁ₐE₅Eᵢᵥ | AlkLEᵥᵢᵢ | E₄* | E_{b} |
| 1724 | E_{1b}E₅Eᵢᵥ | AlkLEᵥᵢᵢ | E₄* | E_{b} |
| 1725 | E₁ₐEᵢᵥE₄ | AlkLEᵥᵢᵢ | E₄* | E_{b} |
| 1726 | E_{1b}EᵢᵥE₄ | AlkLEᵥᵢᵢ | E₄* | E_{b} |
| 1727 | E₁ₐE₅EᵢᵥE₄ | AlkLEᵥᵢᵢ | E₄* | E_{b} |
| 1728 | E_{1b}E₅EᵢᵥE₄ | AlkLEᵥᵢᵢ | E₄* | E_{b} |
| 1729 | E₁ₐ | Eᵥᵢᵢ | | E_{d} |
| 1730 | E_{1b} | Eᵥᵢᵢ | | E_{d} |
| 1731 | E₁ₐE₅ | Eᵥᵢᵢ | | E_{d} |
| 1732 | E_{1b}E₅ | Eᵥᵢᵢ | | E_{d} |
| 1733 | E₁ₐEᵢ | Eᵥᵢᵢ | | E_{d} |
| 1734 | E_{1b}Eᵢ | Eᵥᵢᵢ | | E_{d} |
| 1735 | E₁ₐEᵢᵢ | Eᵥᵢᵢ | | E_{d} |
| 1736 | E_{1b}Eᵢᵢ | Eᵥᵢᵢ | | E_{d} |
| 1737 | E₁ₐEᵢᵢE_{iib} | Eᵥᵢᵢ | | E_{d} |
| 1738 | E_{1b}EᵢᵢE_{iib} | Eᵥᵢᵢ | | E_{d} |
| 1739 | E₁ₐE₅Eᵢ | Eᵥᵢᵢ | | E_{d} |
| 1740 | E_{1b}E₅Eᵢ | Eᵥᵢᵢ | | E_{d} |
| 1741 | E₁ₐE₅Eᵢᵢ | Eᵥᵢᵢ | | E_{d} |
| 1742 | E_{1b}E₅Eᵢᵢ | Eᵥᵢᵢ | | E_{d} |
| 1743 | E₁ₐE₅EᵢᵢE_{iib} | Eᵥᵢᵢ | | E_{d} |
| 1744 | E_{1b}E₅EᵢᵢE_{iib} | Eᵥᵢᵢ | | E_{d} |
| 1745 | E₁ₐE₄ | Eᵥᵢᵢ | | E_{d} |
| 1746 | E_{1b}E₄ | Eᵥᵢᵢ | | E_{d} |
| 1747 | E₁ₐE₅E₄ | Eᵥᵢᵢ | | E_{d} |
| 1748 | E_{1b}E₅E₄ | Eᵥᵢᵢ | | E_{d} |
| 1749 | E₁ₐEᵢE₄ | Eᵥᵢᵢ | | E_{d} |
| 1750 | E_{1b}EᵢE₄ | Eᵥᵢᵢ | | E_{d} |
| 1751 | E₁ₐEᵢᵢE₄ | Eᵥᵢᵢ | | E_{d} |
| 1752 | E_{1b}EᵢᵢE₄ | Eᵥᵢᵢ | | E_{d} |
| 1753 | E₁ₐEᵢᵢE_{iib}E₄ | Eᵥᵢᵢ | | E_{d} |
| 1754 | E_{1b}EᵢᵢE_{iib}E₄ | Eᵥᵢᵢ | | E_{d} |
| 1755 | E₁ₐE₅EᵢE₄ | Eᵥᵢᵢ | | E_{d} |
| 1756 | E_{1b}E₅EᵢE₄ | Eᵥᵢᵢ | | E_{d} |
| 1757 | E₁ₐE₅EᵢᵢE₄ | Eᵥᵢᵢ | | E_{d} |
| 1758 | E_{1b}E₅EᵢᵢE₄ | Eᵥᵢᵢ | | E_{d} |
| 1759 | E₁ₐE₅EᵢᵢE_{iib}E₄ | Eᵥᵢᵢ | | E_{d} |
| 1760 | E_{1b}E₅EᵢᵢE_{iib}E₄ | Eᵥᵢᵢ | | E_{d} |
| 1761 | E₁ₐEᵢᵢᵢ | Eᵥᵢᵢ | | E_{d} |
| 1762 | E_{1b}Eᵢᵢᵢ | Eᵥᵢᵢ | | E_{d} |
| 1763 | E₁ₐE₅Eᵢᵢᵢ | Eᵥᵢᵢ | | E_{d} |
| 1764 | E_{1b}E₅Eᵢᵢᵢ | Eᵥᵢᵢ | | E_{d} |
| 1765 | E₁ₐEᵢᵢᵢE₄ | Eᵥᵢᵢ | | E_{d} |
| 1766 | E_{1b}EᵢᵢᵢE₄ | Eᵥᵢᵢ | | E_{d} |
| 1767 | E₁ₐE₅EᵢᵢᵢE₄ | Eᵥᵢᵢ | | E_{d} |
| 1768 | E_{1b}E₅EᵢᵢᵢE₄ | Eᵥᵢᵢ | | E_{d} |
| 1769 | E₁ₐEᵢᵥ | Eᵥᵢᵢ | | E_{d} |
| 1770 | E_{1b}Eᵢᵥ | Eᵥᵢᵢ | | E_{d} |
| 1771 | E₁ₐE₅Eᵢᵥ | Eᵥᵢᵢ | | E_{d} |
| 1772 | E_{1b}E₅Eᵢᵥ | Eᵥᵢᵢ | | E_{d} |
| 1773 | E₁ₐEᵢᵥE₄ | Eᵥᵢᵢ | | E_{d} |
| 1774 | E_{1b}EᵢᵥE₄ | Eᵥᵢᵢ | | E_{d} |
| 1775 | E₁ₐE₅EᵢᵥE₄ | Eᵥᵢᵢ | | E_{d} |
| 1776 | E_{1b}E₅EᵢᵥE₄ | Eᵥᵢᵢ | | E_{d} |
| 1777 | E₁ₐ | Eᵥᵢᵢ | E₄* | E_{d} |
| 1778 | E_{1b} | Eᵥᵢᵢ | E₄* | E_{d} |
| 1779 | E₁ₐE₅ | Eᵥᵢᵢ | E₄* | E_{d} |
| 1780 | E_{1b}E₅ | Eᵥᵢᵢ | E₄* | E_{d} |
| 1781 | E₁ₐEᵢ | Eᵥᵢᵢ | E₄* | E_{d} |
| 1782 | E_{1b}Eᵢ | Eᵥᵢᵢ | E₄* | E_{d} |
| 1783 | E₁ₐEᵢᵢ | Eᵥᵢᵢ | E₄* | E_{d} |
| 1784 | E_{1b}Eᵢᵢ | Eᵥᵢᵢ | E₄* | E_{d} |
| 1785 | E₁ₐEᵢᵢE_{iib} | Eᵥᵢᵢ | E₄* | E_{d} |
| 1786 | E_{1b}EᵢᵢE_{iib} | Eᵥᵢᵢ | E₄* | E_{d} |
| 1787 | E₁ₐE₅Eᵢ | Eᵥᵢᵢ | E₄* | E_{d} |
| 1788 | E_{1b}E₅Eᵢ | Eᵥᵢᵢ | E₄* | E_{d} |
| 1789 | E₁ₐE₅Eᵢᵢ | Eᵥᵢᵢ | E₄* | E_{d} |
| 1790 | E_{1b}E₅Eᵢᵢ | Eᵥᵢᵢ | E₄* | E_{d} |
| 1791 | E₁ₐE₅EᵢᵢE_{iib} | Eᵥᵢᵢ | E₄* | E_{d} |
| 1792 | E_{1b}E₅EᵢᵢE_{iib} | Eᵥᵢᵢ | E₄* | E_{d} |
| 1793 | E₁ₐE₄ | Eᵥᵢᵢ | E₄* | E_{d} |
| 1794 | E_{1b}E₄ | Eᵥᵢᵢ | E₄* | E_{d} |
| 1795 | E₁ₐE₅E₄ | Eᵥᵢᵢ | E₄* | E_{d} |
| 1796 | E_{1b}E₅E₄ | Eᵥᵢᵢ | E₄* | E_{d} |
| 1797 | E₁ₐEᵢE₄ | Eᵥᵢᵢ | E₄* | E_{d} |
| 1798 | E_{1b}EᵢE₄ | Eᵥᵢᵢ | E₄* | E_{d} |
| 1799 | E₁ₐEᵢᵢE₄ | Eᵥᵢᵢ | E₄* | E_{d} |
| 1800 | E_{1b}EᵢᵢE₄ | Eᵥᵢᵢ | E₄* | E_{d} |
| 1801 | E₁ₐEᵢᵢE_{iib}E₄ | Eᵥᵢᵢ | E₄* | E_{d} |
| 1802 | E_{1b}EᵢᵢE_{iib}E₄ | Eᵥᵢᵢ | E₄* | E_{d} |
| 1803 | E₁ₐE₅EᵢE₄ | Eᵥᵢᵢ | E₄* | E_{d} |
| 1804 | E_{1b}E₅EᵢE₄ | Eᵥᵢᵢ | E₄* | E_{d} |
| 1805 | E₁ₐE₅EᵢᵢE₄ | Eᵥᵢᵢ | E₄* | E_{d} |
| 1806 | E_{1b}E₅EᵢᵢE₄ | Eᵥᵢᵢ | E₄* | E_{d} |
| 1807 | E₁ₐE₅EᵢᵢE_{iib}E₄ | Eᵥᵢᵢ | E₄* | E_{d} |
| 1808 | E_{1b}E₅EᵢᵢE_{iib}E₄ | Eᵥᵢᵢ | E₄* | E_{d} |
| 1809 | E₁ₐEᵢᵢᵢ | Eᵥᵢᵢ | E₄* | E_{d} |
| 1810 | E_{1b}Eᵢᵢᵢ | Eᵥᵢᵢ | E₄* | E_{d} |
| 1811 | E₁ₐE₅Eᵢᵢᵢ | Eᵥᵢᵢ | E₄* | E_{d} |
| 1812 | E_{1b}E₅Eᵢᵢᵢ | Eᵥᵢᵢ | E₄* | E_{d} |
| 1813 | E₁ₐEᵢᵢᵢE₄ | Eᵥᵢᵢ | E₄* | E_{d} |
| 1814 | E_{1b}EᵢᵢᵢE₄ | Eᵥᵢᵢ | E₄* | E_{d} |
| 1815 | E₁ₐE₅EᵢᵢᵢE₄ | Eᵥᵢᵢ | E₄* | E_{d} |
| 1816 | E_{1b}E₅EᵢᵢᵢE₄ | Eᵥᵢᵢ | E₄* | E_{d} |
| 1817 | E₁ₐEᵢᵥ | Eᵥᵢᵢ | E₄* | E_{d} |
| 1818 | E_{1b}Eᵢᵥ | Eᵥᵢᵢ | E₄* | E_{d} |
| 1819 | E₁ₐE₅Eᵢᵥ | Eᵥᵢᵢ | E₄* | E_{d} |
| 1820 | E_{1b}E₅Eᵢᵥ | Eᵥᵢᵢ | E₄* | E_{d} |
| 1821 | E₁ₐEᵢᵥE₄ | Eᵥᵢᵢ | E₄* | E_{d} |
| 1822 | E_{1b}EᵢᵥE₄ | Eᵥᵢᵢ | E₄* | E_{d} |
| 1823 | E₁ₐE₅EᵢᵥE₄ | Eᵥᵢᵢ | E₄* | E_{d} |
| 1824 | E_{1b}E₅EᵢᵥE₄ | Eᵥᵢᵢ | E₄* | E_{d} |
| 1825 | E₁ₐ | AlkLEᵥᵢᵢ | | E_{d} |
| 1826 | E_{1b} | AlkLEᵥᵢᵢ | | E_{d} |
| 1827 | E₁ₐE₅ | AlkLEᵥᵢᵢ | | E_{d} |
| 1828 | E_{1b}E₅ | AlkLEᵥᵢᵢ | | E_{d} |
| 1829 | E₁ₐEᵢ | AlkLEᵥᵢᵢ | | E_{d} |
| 1830 | E_{1b}Eᵢ | AlkLEᵥᵢᵢ | | E_{d} |
| 1831 | E₁ₐEᵢᵢ | AlkLEᵥᵢᵢ | | E_{d} |
| 1832 | E_{1b}Eᵢᵢ | AlkLEᵥᵢᵢ | | E_{d} |
| 1833 | E₁ₐEᵢᵢE_{iib} | AlkLEᵥᵢᵢ | | E_{d} |
| 1834 | E_{1b}EᵢᵢE_{iib} | AlkLEᵥᵢᵢ | | E_{d} |
| 1835 | E₁ₐE₅Eᵢ | AlkLEᵥᵢᵢ | | E_{d} |
| 1836 | E_{1b}E₅Eᵢ | AlkLEᵥᵢᵢ | | E_{d} |
| 1837 | E₁ₐE₅Eᵢᵢ | AlkLEᵥᵢᵢ | | E_{d} |
| 1838 | E_{1b}E₅Eᵢᵢ | AlkLEᵥᵢᵢ | | E_{d} |
| 1839 | E₁ₐE₅EᵢᵢE_{iib} | AlkLEᵥᵢᵢ | | E_{d} |
| 1840 | E_{1b}E₅EᵢᵢE_{iib} | AlkLEᵥᵢᵢ | | E_{d} |
| 1841 | E₁ₐE₄ | AlkLEᵥᵢᵢ | | E_{d} |
| 1842 | E_{1b}E₄ | AlkLEᵥᵢᵢ | | E_{d} |
| 1843 | E₁ₐE₅E₄ | AlkLEᵥᵢᵢ | | E_{d} |
| 1844 | E_{1b}E₅E₄ | AlkLEᵥᵢᵢ | | E_{d} |
| 1845 | E₁ₐEᵢE₄ | AlkLEᵥᵢᵢ | | E_{d} |
| 1846 | E_{1b}EᵢE₄ | AlkLEᵥᵢᵢ | | E_{d} |
| 1847 | E₁ₐEᵢᵢE₄ | AlkLEᵥᵢᵢ | | E_{d} |
| 1848 | E_{1b}EᵢᵢE₄ | AlkLEᵥᵢᵢ | | E_{d} |
| 1849 | E₁ₐEᵢᵢE_{iib}E₄ | AlkLEᵥᵢᵢ | | E_{d} |
| 1850 | E_{1b}EᵢᵢE_{iib}E₄ | AlkLEᵥᵢᵢ | | E_{d} |
| 1851 | E₁ₐE₅EᵢE₄ | AlkLEᵥᵢᵢ | | E_{d} |
| 1852 | E_{1b}E₅EᵢE₄ | AlkLEᵥᵢᵢ | | E_{d} |
| 1853 | E₁ₐE₅EᵢᵢE₄ | AlkLEᵥᵢᵢ | | E_{d} |
| 1854 | E_{1b}E₅EᵢᵢE₄ | AlkLEᵥᵢᵢ | | E_{d} |
| 1855 | E₁ₐE₅EᵢᵢE_{iib}E₄ | AlkLEᵥᵢᵢ | | E_{d} |
| 1856 | E_{1b}E₅EᵢᵢE_{iib}E₄ | AlkLEᵥᵢᵢ | | E_{d} |
| 1857 | E₁ₐEᵢᵢᵢ | AlkLEᵥᵢᵢ | | E_{d} |
| 1858 | E_{1b}Eᵢᵢᵢ | AlkLEᵥᵢᵢ | | E_{d} |
| 1859 | E₁ₐE₅Eᵢᵢᵢ | AlkLEᵥᵢᵢ | | E_{d} |
| 1860 | E_{1b}E₅Eᵢᵢᵢ | AlkLEᵥᵢᵢ | | E_{d} |
| 1861 | E₁ₐEᵢᵢᵢE₄ | AlkLEᵥᵢᵢ | | E_{d} |
| 1862 | E_{1b}EᵢᵢᵢE₄ | AlkLEᵥᵢᵢ | | E_{d} |
| 1863 | E₁ₐE₅EᵢᵢᵢE₄ | AlkLEᵥᵢᵢ | | E_{d} |
| 1864 | E_{1b}E₅EᵢᵢᵢE₄ | AlkLEᵥᵢᵢ | | E_{d} |
| 1865 | E₁ₐEᵢᵥ | AlkLEᵥᵢᵢ | | E_{d} |
| 1866 | E_{1b}Eᵢᵥ | AlkLEᵥᵢᵢ | | E_{d} |
| 1867 | E₁ₐE₅Eᵢᵥ | AlkLEᵥᵢᵢ | | E_{d} |
| 1868 | E_{1b}E₅Eᵢᵥ | AlkLEᵥᵢᵢ | | E_{d} |
| 1869 | E₁ₐEᵢᵥE₄ | AlkLEᵥᵢᵢ | | E_{d} |
| 1870 | E_{1b}EᵢᵥE₄ | AlkLEᵥᵢᵢ | | E_{d} |
| 1871 | E₁ₐE₅EᵢᵥE₄ | AlkLEᵥᵢᵢ | | E_{d} |
| 1872 | E_{1b}E₅EᵢᵥE₄ | AlkLEᵥᵢᵢ | | E_{d} |
| 1873 | E₁ₐ | AlkLEᵥᵢᵢ | E₄* | E_{d} |
| 1874 | E_{1b} | AlkLEᵥᵢᵢ | E₄* | E_{d} |
| 1875 | E₁ₐE₅ | AlkLEᵥᵢᵢ | E₄* | E_{d} |
| 1876 | E_{1b}E₅ | AlkLEᵥᵢᵢ | E₄* | E_{d} |
| 1877 | E₁ₐEᵢ | AlkLEᵥᵢᵢ | E₄* | E_{d} |
| 1878 | E_{1b}Eᵢ | AlkLEᵥᵢᵢ | E₄* | E_{d} |
| 1879 | E₁ₐEᵢᵢ | AlkLEᵥᵢᵢ | E₄* | E_{d} |
| 1880 | E_{1b}Eᵢᵢ | AlkLEᵥᵢᵢ | E₄* | E_{d} |
| 1881 | E₁ₐEᵢᵢE_{iib} | AlkLEᵥᵢᵢ | E₄* | E_{d} |
| 1882 | E_{1b}EᵢᵢE_{iib} | AlkLEᵥᵢᵢ | E₄* | E_{d} |
| 1883 | E₁ₐE₅Eᵢ | AlkLEᵥᵢᵢ | E₄* | E_{d} |
| 1884 | E_{1b}E₅Eᵢ | AlkLEᵥᵢᵢ | E₄* | E_{d} |
| 1885 | E₁ₐE₅Eᵢᵢ | AlkLEᵥᵢᵢ | E₄* | E_{d} |
| 1886 | E_{1b}E₅Eᵢᵢ | AlkLEᵥᵢᵢ | E₄* | E_{d} |
| 1887 | E₁ₐE₅EᵢᵢE_{iib} | AlkLEᵥᵢᵢ | E₄* | E_{d} |
| 1888 | E_{1b}E₅EᵢᵢE_{iib} | AlkLEᵥᵢᵢ | E₄* | E_{d} |
| 1889 | E₁ₐE₄ | AlkLEᵥᵢᵢ | E₄* | E_{d} |
| 1890 | E_{1b}E₄ | AlkLEᵥᵢᵢ | E₄* | E_{d} |
| 1891 | E₁ₐE₅E₄ | AlkLEᵥᵢᵢ | E₄* | E_{d} |
| 1892 | E_{1b}E₅E₄ | AlkLEᵥᵢᵢ | E₄* | E_{d} |
| 1893 | E₁ₐEᵢE₄ | AlkLEᵥᵢᵢ | E₄* | E_{d} |
| 1894 | E_{1b}EᵢE₄ | AlkLEᵥᵢᵢ | E₄* | E_{d} |
| 1895 | E₁ₐEᵢᵢE₄ | AlkLEᵥᵢᵢ | E₄* | E_{d} |
| 1896 | E_{1b}EᵢᵢE₄ | AlkLEᵥᵢᵢ | E₄* | E_{d} |
| 1897 | E₁ₐEᵢᵢE_{iib}E₄ | AlkLEᵥᵢᵢ | E₄* | E_{d} |
| 1898 | E_{1b}EᵢᵢE_{iib}E₄ | AlkLEᵥᵢᵢ | E₄* | E_{d} |
| 1899 | E₁ₐE₅EᵢE₄ | AlkLEᵥᵢᵢ | E₄* | E_{d} |
| 1900 | E_{1b}E₅EᵢE₄ | AlkLEᵥᵢᵢ | E₄* | E_{d} |
| 1901 | E₁ₐE₅EᵢᵢE₄ | AlkLEᵥᵢᵢ | E₄* | E_{d} |
| 1902 | E_{1b}E₅EᵢᵢE₄ | AlkLEᵥᵢᵢ | E₄* | E_{d} |
| 1903 | E₁ₐE₅EᵢᵢE_{iib}E₄ | AlkLEᵥᵢᵢ | E₄* | E_{d} |
| 1904 | E_{1b}E₅EᵢᵢE_{iib}E₄ | AlkLEᵥᵢᵢ | E₄* | E_{d} |
| 1905 | E₁ₐEᵢᵢᵢ | AlkLEᵥᵢᵢ | E₄* | E_{d} |
| 1906 | E_{1b}Eᵢᵢᵢ | AlkLEᵥᵢᵢ | E₄* | E_{d} |
| 1907 | E₁ₐE₅Eᵢᵢᵢ | AlkLEᵥᵢᵢ | E₄* | E_{d} |
| 1908 | E_{1b}E₅Eᵢᵢᵢ | AlkLEᵥᵢᵢ | E₄* | E_{d} |
| 1909 | E₁ₐEᵢᵢᵢE₄ | AlkLEᵥᵢᵢ | E₄* | E_{d} |
| 1910 | E_{1b}EᵢᵢᵢE₄ | AlkLEᵥᵢᵢ | E₄* | E_{d} |
| 1911 | E₁ₐE₅EᵢᵢᵢE₄ | AlkLEᵥᵢᵢ | E₄* | E_{d} |
| 1912 | E_{1b}E₅EᵢᵢᵢE₄ | AlkLEᵥᵢᵢ | E₄* | E_{d} |
| 1913 | E₁ₐEᵢᵥ | AlkLEᵥᵢᵢ | E₄* | E_{d} |
| 1914 | E_{1b}Eᵢᵥ | AlkLEᵥᵢᵢ | E₄* | E_{d} |
| 1915 | E₁ₐE₅Eᵢᵥ | AlkLEᵥᵢᵢ | E₄* | E_{d} |
| 1916 | E_{1b}E₅Eᵢᵥ | AlkLEᵥᵢᵢ | E₄* | E_{d} |
| 1917 | E₁ₐEᵢᵥE₄ | AlkLEᵥᵢᵢ | E₄* | E_{d} |
| 1918 | E_{1b}EᵢᵥE₄ | AlkLEᵥᵢᵢ | E₄* | E_{d} |
| 1919 | E₁ₐE₅EᵢᵥE₄ | AlkLEᵥᵢᵢ | E₄* | E_{d} |
| 1920 | E_{1b}E₅EᵢᵥE₄ | AlkLEᵥᵢᵢ | E₄* | E_{d} |
| 1921 | E₁ₐ | Eᵥᵢᵢ | | Eₑ |
| 1922 | E_{1b} | Eᵥᵢᵢ | | Eₑ |
| 1923 | E₁ₐE₅ | Eᵥᵢᵢ | | Eₑ |
| 1924 | E_{1b}E₅ | Eᵥᵢᵢ | | Eₑ |
| 1925 | E₁ₐEᵢ | Eᵥᵢᵢ | | Eₑ |
| 1926 | E_{1b}Eᵢ | Eᵥᵢᵢ | | Eₑ |
| 1927 | E₁ₐEᵢᵢ | Eᵥᵢᵢ | | Eₑ |
| 1928 | E_{1b}Eᵢᵢ | Eᵥᵢᵢ | | Eₑ |
| 1929 | E₁ₐEᵢᵢE_{iib} | Eᵥᵢᵢ | | Eₑ |
| 1930 | E_{1b}EᵢᵢE_{iib} | Eᵥᵢᵢ | | Eₑ |
| 1931 | E₁ₐE₅Eᵢ | Eᵥᵢᵢ | | Eₑ |
| 1932 | E_{1b}E₅Eᵢ | Eᵥᵢᵢ | | Eₑ |
| 1933 | E₁ₐE₅Eᵢᵢ | Eᵥᵢᵢ | | Eₑ |
| 1934 | E_{1b}E₅Eᵢᵢ | Eᵥᵢᵢ | | Eₑ |
| 1935 | E₁ₐE₅EᵢᵢE_{iib} | Eᵥᵢᵢ | | Eₑ |
| 1936 | E_{1b}E₅EᵢᵢE_{iib} | Eᵥᵢᵢ | | Eₑ |
| 1937 | E₁ₐE₄ | Eᵥᵢᵢ | | Eₑ |
| 1938 | E_{1b}E₄ | Eᵥᵢᵢ | | Eₑ |
| 1939 | E₁ₐE₅E₄ | Eᵥᵢᵢ | | Eₑ |
| 1940 | E_{1b}E₅E₄ | Eᵥᵢᵢ | | Eₑ |
| 1941 | E₁ₐEᵢE₄ | Eᵥᵢᵢ | | Eₑ |
| 1942 | E_{1b}EᵢE₄ | Eᵥᵢᵢ | | Eₑ |
| 1943 | E₁ₐEᵢᵢE₄ | Eᵥᵢᵢ | | Eₑ |
| 1944 | E_{1b}EᵢᵢE₄ | Eᵥᵢᵢ | | Eₑ |
| 1945 | E₁ₐEᵢᵢE_{iib}E₄ | Eᵥᵢᵢ | | Eₑ |
| 1946 | E_{1b}EᵢᵢE_{iib}E₄ | Eᵥᵢᵢ | | Eₑ |
| 1947 | E₁ₐE₅EᵢE₄ | Eᵥᵢᵢ | | Eₑ |
| 1948 | E_{1b}E₅EᵢE₄ | Eᵥᵢᵢ | | Eₑ |
| 1949 | E₁ₐE₅EᵢᵢE₄ | Eᵥᵢᵢ | | Eₑ |
| 1950 | E_{1b}E₅EᵢᵢE₄ | Eᵥᵢᵢ | | Eₑ |
| 1951 | E₁ₐE₅EᵢᵢE_{iib}E₄ | Eᵥᵢᵢ | | Eₑ |
| 1952 | E_{1b}E₅EᵢᵢE_{iib}E₄ | Eᵥᵢᵢ | | Eₑ |
| 1953 | E₁ₐEᵢᵢᵢ | Eᵥᵢᵢ | | Eₑ |
| 1954 | E_{1b}Eᵢᵢᵢ | Eᵥᵢᵢ | | Eₑ |
| 1955 | E₁ₐE₅Eᵢᵢᵢ | Eᵥᵢᵢ | | Eₑ |
| 1956 | E_{1b}E₅Eᵢᵢᵢ | Eᵥᵢᵢ | | Eₑ |
| 1957 | E₁ₐEᵢᵢᵢE₄ | Eᵥᵢᵢ | | Eₑ |
| 1958 | E_{1b}EᵢᵢᵢE₄ | Eᵥᵢᵢ | | Eₑ |
| 1959 | E₁ₐE₅EᵢᵢᵢE₄ | Eᵥᵢᵢ | | Eₑ |
| 1960 | E_{1b}E₅EᵢᵢᵢE₄ | Eᵥᵢᵢ | | Eₑ |
| 1961 | E₁ₐEᵢᵥ | Eᵥᵢᵢ | | Eₑ |
| 1962 | E_{1b}Eᵢᵥ | Eᵥᵢᵢ | | Eₑ |
| 1963 | E₁ₐE₅Eᵢᵥ | Eᵥᵢᵢ | | Eₑ |
| 1964 | E_{1b}E₅Eᵢᵥ | Eᵥᵢᵢ | | Eₑ |
| 1965 | E₁ₐEᵢᵥE₄ | Eᵥᵢᵢ | | Eₑ |
| 1966 | E_{1b}EᵢᵥE₄ | Eᵥᵢᵢ | | Eₑ |
| 1967 | E₁ₐE₅EᵢᵥE₄ | Eᵥᵢᵢ | | Eₑ |
| 1968 | E_{1b}E₅EᵢᵥE₄ | Eᵥᵢᵢ | | Eₑ |
| 1969 | E₁ₐ | Eᵥᵢᵢ | E₄* | Eₑ |
| 1970 | E_{1b} | Eᵥᵢᵢ | E₄* | Eₑ |
| 1971 | E₁ₐE₅ | Eᵥᵢᵢ | E₄* | Eₑ |
| 1972 | E_{1b}E₅ | Eᵥᵢᵢ | E₄* | Eₑ |
| 1973 | E₁ₐEᵢ | Eᵥᵢᵢ | E₄* | Eₑ |
| 1974 | E_{1b}Eᵢ | Eᵥᵢᵢ | E₄* | Eₑ |
| 1975 | E₁ₐEᵢᵢ | Eᵥᵢᵢ | E₄* | Eₑ |
| 1976 | E_{1b}Eᵢᵢ | Eᵥᵢᵢ | E₄* | Eₑ |
| 1977 | E₁ₐEᵢᵢE_{iib} | Eᵥᵢᵢ | E₄* | Eₑ |
| 1978 | E_{1b}EᵢᵢE_{iib} | Eᵥᵢᵢ | E₄* | Eₑ |
| 1979 | E₁ₐE₅Eᵢ | Eᵥᵢᵢ | E₄* | Eₑ |
| 1980 | E_{1b}E₅Eᵢ | Eᵥᵢᵢ | E₄* | Eₑ |
| 1981 | E₁ₐE₅Eᵢᵢ | Eᵥᵢᵢ | E₄* | Eₑ |
| 1982 | E_{1b}E₅Eᵢᵢ | Eᵥᵢᵢ | E₄* | Eₑ |
| 1983 | E₁ₐE₅EᵢᵢE_{iib} | Eᵥᵢᵢ | E₄* | Eₑ |
| 1984 | E_{1b}E₅EᵢᵢE_{iib} | Eᵥᵢᵢ | E₄* | Eₑ |
| 1985 | E₁ₐE₄ | Eᵥᵢᵢ | E₄* | Eₑ |
| 1986 | E_{1b}E₄ | Eᵥᵢᵢ | E₄* | Eₑ |
| 1987 | E₁ₐE₅E₄ | Eᵥᵢᵢ | E₄* | Eₑ |
| 1988 | E_{1b}E₅E₄ | Eᵥᵢᵢ | E₄* | Eₑ |
| 1989 | E₁ₐEᵢE₄ | Eᵥᵢᵢ | E₄* | Eₑ |
| 1990 | E_{1b}EᵢE₄ | Eᵥᵢᵢ | E₄* | Eₑ |
| 1991 | E₁ₐEᵢᵢE₄ | Eᵥᵢᵢ | E₄* | Eₑ |
| 1992 | E_{1b}EᵢᵢE₄ | Eᵥᵢᵢ | E₄* | Eₑ |
| 1993 | E₁ₐEᵢᵢE_{iib}E₄ | Eᵥᵢᵢ | E₄* | Eₑ |
| 1994 | E_{1b}EᵢᵢE_{iib}E₄ | Eᵥᵢᵢ | E₄* | Eₑ |
| 1995 | E₁ₐE₅EᵢE₄ | Eᵥᵢᵢ | E₄* | Eₑ |
| 1996 | E_{1b}E₅EᵢE₄ | Eᵥᵢᵢ | E₄* | Eₑ |
| 1997 | E₁ₐE₅EᵢᵢE₄ | Eᵥᵢᵢ | E₄* | Eₑ |
| 1998 | E_{1b}E₅EᵢᵢE₄ | Eᵥᵢᵢ | E₄* | Eₑ |
| 1999 | E₁ₐE₅EᵢᵢE_{iib}E₄ | Eᵥᵢᵢ | E₄* | Eₑ |
| 2000 | E_{1b}E₅EᵢᵢE_{iib}E₄ | Eᵥᵢᵢ | E₄* | Eₑ |
| 2001 | E₁ₐEᵢᵢᵢ | Eᵥᵢᵢ | E₄* | Eₑ |
| 2002 | E_{1b}Eᵢᵢᵢ | Eᵥᵢᵢ | E₄* | Eₑ |
| 2003 | E₁ₐE₅Eᵢᵢᵢ | Eᵥᵢᵢ | E₄* | Eₑ |
| 2004 | E_{1b}E₅Eᵢᵢᵢ | Eᵥᵢᵢ | E₄* | Eₑ |
| 2005 | E₁ₐEᵢᵢᵢE₄ | Eᵥᵢᵢ | E₄* | Eₑ |
| 2006 | E_{1b}EᵢᵢᵢE₄ | Eᵥᵢᵢ | E₄* | Eₑ |
| 2007 | E₁ₐE₅EᵢᵢᵢE₄ | Eᵥᵢᵢ | E₄* | Eₑ |
| 2008 | E_{1b}E₅EᵢᵢᵢE₄ | Eᵥᵢᵢ | E₄* | Eₑ |
| 2009 | E₁ₐEᵢᵥ | Eᵥᵢᵢ | E₄* | Eₑ |
| 2010 | E_{1b}Eᵢᵥ | Eᵥᵢᵢ | E₄* | Eₑ |
| 2011 | E₁ₐE₅Eᵢᵥ | Eᵥᵢᵢ | E₄* | Eₑ |
| 2012 | E_{1b}E₅Eᵢᵥ | Eᵥᵢᵢ | E₄* | Eₑ |
| 2013 | E₁ₐEᵢᵥE₄ | Eᵥᵢᵢ | E₄* | Eₑ |
| 2014 | E_{1b}EᵢᵥE₄ | Eᵥᵢᵢ | E₄* | Eₑ |
| 2015 | E₁ₐE₅EᵢᵥE₄ | Eᵥᵢᵢ | E₄* | Eₑ |
| 2016 | E_{1b}E₅EᵢᵥE₄ | Eᵥᵢᵢ | E₄* | Eₑ |
| 2017 | E₁ₐ | AlkLEᵥᵢᵢ | | Eₑ |
| 2018 | E_{1b} | AlkLEᵥᵢᵢ | | Eₑ |
| 2019 | E₁ₐE₅ | AlkLEᵥᵢᵢ | | Eₑ |
| 2020 | E_{1b}E₅ | AlkLEᵥᵢᵢ | | Eₑ |
| 2021 | E₁ₐEᵢ | AlkLEᵥᵢᵢ | | Eₑ |
| 2022 | E_{1b}Eᵢ | AlkLEᵥᵢᵢ | | Eₑ |
| 2023 | E₁ₐEᵢᵢ | AlkLEᵥᵢᵢ | | Eₑ |
| 2024 | E_{1b}Eᵢᵢ | AlkLEᵥᵢᵢ | | Eₑ |
| 2025 | E₁ₐEᵢᵢE_{iib} | AlkLEᵥᵢᵢ | | Eₑ |
| 2026 | E_{1b}EᵢᵢE_{iib} | AlkLEᵥᵢᵢ | | Eₑ |
| 2027 | E₁ₐE₅Eᵢ | AlkLEᵥᵢᵢ | | Eₑ |
| 2028 | E_{1b}E₅Eᵢ | AlkLEᵥᵢᵢ | | Eₑ |
| 2029 | E₁ₐE₅Eᵢᵢ | AlkLEᵥᵢᵢ | | Eₑ |
| 2030 | E_{1b}E₅Eᵢᵢ | AlkLEᵥᵢᵢ | | Eₑ |
| 2031 | E₁ₐE₅EᵢᵢE_{iib} | AlkLEᵥᵢᵢ | | Eₑ |
| 2032 | E_{1b}E₅EᵢᵢE_{iib} | AlkLEᵥᵢᵢ | | Eₑ |
| 2033 | E₁ₐE₄ | AlkLEᵥᵢᵢ | | Eₑ |
| 2034 | E_{1b}E₄ | AlkLEᵥᵢᵢ | | Eₑ |
| 2035 | E₁ₐE₅E₄ | AlkLEᵥᵢᵢ | | Eₑ |
| 2036 | E_{1b}E₅E₄ | AlkLEᵥᵢᵢ | | Eₑ |
| 2037 | E₁ₐEᵢE₄ | AlkLEᵥᵢᵢ | | Eₑ |
| 2038 | E_{1b}EᵢE₄ | AlkLEᵥᵢᵢ | | Eₑ |
| 2039 | E₁ₐEᵢᵢE₄ | AlkLEᵥᵢᵢ | | Eₑ |
| 2040 | E_{1b}EᵢᵢE₄ | AlkLEᵥᵢᵢ | | Eₑ |
| 2041 | E₁ₐEᵢᵢE_{iib}E₄ | AlkLEᵥᵢᵢ | | Eₑ |
| 2042 | E_{1b}EᵢᵢE_{iib}E₄ | AlkLEᵥᵢᵢ | | Eₑ |
| 2043 | E₁ₐE₅EᵢE₄ | AlkLEᵥᵢᵢ | | Eₑ |
| 2044 | E_{1b}E₅EᵢE₄ | AlkLEᵥᵢᵢ | | Eₑ |
| 2045 | E₁ₐE₅EᵢᵢE₄ | AlkLEᵥᵢᵢ | | Eₑ |
| 2046 | E_{1b}E₅EᵢᵢE₄ | AlkLEᵥᵢᵢ | | Eₑ |
| 2047 | E₁ₐE₅EᵢᵢE_{iib}E₄ | AlkLEᵥᵢᵢ | | Eₑ |
| 2048 | E_{1b}E₅EᵢᵢE_{iib}E₄ | AlkLEᵥᵢᵢ | | Eₑ |
| 2049 | E₁ₐEᵢᵢᵢ | AlkLEᵥᵢᵢ | | Eₑ |
| 2050 | E_{1b}Eᵢᵢᵢ | AlkLEᵥᵢᵢ | | Eₑ |
| 2051 | E₁ₐE₅Eᵢᵢᵢ | AlkLEᵥᵢᵢ | | Eₑ |
| 2052 | E_{1b}E₅Eᵢᵢᵢ | AlkLEᵥᵢᵢ | | Eₑ |
| 2053 | E₁ₐEᵢᵢᵢE₄ | AlkLEᵥᵢᵢ | | Eₑ |
| 2054 | E_{1b}EᵢᵢᵢE₄ | AlkLEᵥᵢᵢ | | Eₑ |
| 2055 | E₁ₐE₅EᵢᵢᵢE₄ | AlkLEᵥᵢᵢ | | Eₑ |
| 2056 | E_{1b}E₅EᵢᵢᵢE₄ | AlkLEᵥᵢᵢ | | Eₑ |
| 2057 | E₁ₐEᵢᵥ | AlkLEᵥᵢᵢ | | Eₑ |
| 2058 | E_{1b}Eᵢᵥ | AlkLEᵥᵢᵢ | | Eₑ |
| 2059 | E₁ₐE₅Eᵢᵥ | AlkLEᵥᵢᵢ | | Eₑ |
| 2060 | E_{1b}E₅Eᵢᵥ | AlkLEᵥᵢᵢ | | Eₑ |
| 2061 | E₁ₐEᵢᵥE₄ | AlkLEᵥᵢᵢ | | Eₑ |
| 2062 | E_{1b}EᵢᵥE₄ | AlkLEᵥᵢᵢ | | Eₑ |
| 2063 | E₁ₐE₅EᵢᵥE₄ | AlkLEᵥᵢᵢ | | Eₑ |
| 2064 | E_{1b}E₅EᵢᵥE₄ | AlkLEᵥᵢᵢ | | Eₑ |
| 2065 | E₁ₐ | AlkLEᵥᵢᵢ | E₄* | Eₑ |
| 2066 | E_{1b} | AlkLEᵥᵢᵢ | E₄* | Eₑ |
| 2067 | E₁ₐE₅ | AlkLEᵥᵢᵢ | E₄* | Eₑ |
| 2068 | E_{1b}E₅ | AlkLEᵥᵢᵢ | E₄* | Eₑ |
| 2069 | E₁ₐEᵢ | AlkLEᵥᵢᵢ | E₄* | Eₑ |
| 2070 | E_{1b}Eᵢ | AlkLEᵥᵢᵢ | E₄* | Eₑ |
| 2071 | E₁ₐEᵢᵢ | AlkLEᵥᵢᵢ | E₄* | Eₑ |
| 2072 | E_{1b}Eᵢᵢ | AlkLEᵥᵢᵢ | E₄* | Eₑ |
| 2073 | E₁ₐEᵢᵢE_{iib} | AlkLEᵥᵢᵢ | E₄* | Eₑ |
| 2074 | E_{1b}EᵢᵢE_{iib} | AlkLEᵥᵢᵢ | E₄* | Eₑ |
| 2075 | E₁ₐE₅Eᵢ | AlkLEᵥᵢᵢ | E₄* | Eₑ |
| 2076 | E_{1b}E₅Eᵢ | AlkLEᵥᵢᵢ | E₄* | Eₑ |
| 2077 | E₁ₐE₅Eᵢᵢ | AlkLEᵥᵢᵢ | E₄* | Eₑ |
| 2078 | E_{1b}E₅Eᵢᵢ | AlkLEᵥᵢᵢ | E₄* | Eₑ |
| 2079 | E₁ₐE₅EᵢᵢE_{iib} | AlkLEᵥᵢᵢ | E₄* | Eₑ |
| 2080 | E_{1b}E₅EᵢᵢE_{iib} | AlkLEᵥᵢᵢ | E₄* | Eₑ |
| 2081 | E₁ₐE₄ | AlkLEᵥᵢᵢ | E₄* | Eₑ |
| 2082 | E_{1b}E₄ | AlkLEᵥᵢᵢ | E₄* | Eₑ |
| 2083 | E₁ₐE₅E₄ | AlkLEᵥᵢᵢ | E₄* | Eₑ |
| 2084 | E_{1b}E₅E₄ | AlkLEᵥᵢᵢ | E₄* | Eₑ |
| 2085 | E₁ₐEᵢE₄ | AlkLEᵥᵢᵢ | E₄* | Eₑ |
| 2086 | E_{1b}EᵢE₄ | AlkLEᵥᵢᵢ | E₄* | Eₑ |
| 2087 | E₁ₐEᵢᵢE₄ | AlkLEᵥᵢᵢ | E₄* | Eₑ |
| 2088 | E_{1b}EᵢᵢE₄ | AlkLEᵥᵢᵢ | E₄* | Eₑ |
| 2089 | E₁ₐEᵢᵢE_{iib}E₄ | AlkLEᵥᵢᵢ | E₄* | Eₑ |
| 2090 | E_{1b}EᵢᵢE_{iib}E₄ | AlkLEᵥᵢᵢ | E₄* | Eₑ |
| 2091 | E₁ₐE₅EᵢE₄ | AlkLEᵥᵢᵢ | E₄* | Eₑ |
| 2092 | E_{1b}E₅EᵢE₄ | AlkLEᵥᵢᵢ | E₄* | Eₑ |
| 2093 | E₁ₐE₅EᵢᵢE₄ | AlkLEᵥᵢᵢ | E₄* | Eₑ |
| 2094 | E_{1b}E₅EᵢᵢE₄ | AlkLEᵥᵢᵢ | E₄* | Eₑ |
| 2095 | E₁ₐE₅EᵢᵢE_{iib}E₄ | AlkLEᵥᵢᵢ | E₄* | Eₑ |
| 2096 | E_{1b}E₅EᵢᵢE_{iib}E₄ | AlkLEᵥᵢᵢ | E₄* | Eₑ |
| 2097 | E₁ₐEᵢᵢᵢ | AlkLEᵥᵢᵢ | E₄* | Eₑ |
| 2098 | E_{1b}Eᵢᵢᵢ | AlkLEᵥᵢᵢ | E₄* | Eₑ |
| 2099 | E₁ₐE₅Eᵢᵢᵢ | AlkLEᵥᵢᵢ | E₄* | Eₑ |
| 2100 | E_{1b}E₅Eᵢᵢᵢ | AlkLEᵥᵢᵢ | E₄* | Eₑ |
| 2101 | E₁ₐEᵢᵢᵢE₄ | AlkLEᵥᵢᵢ | E₄* | Eₑ |
| 2102 | E_{1b}EᵢᵢᵢE₄ | AlkLEᵥᵢᵢ | E₄* | Eₑ |
| 2103 | E₁ₐE₅EᵢᵢᵢE₄ | AlkLEᵥᵢᵢ | E₄* | Eₑ |
| 2104 | E_{1b}E₅EᵢᵢᵢE₄ | AlkLEᵥᵢᵢ | E₄* | Eₑ |
| 2105 | E₁ₐEᵢᵥ | AlkLEᵥᵢᵢ | E₄* | Eₑ |
| 2106 | E_{1b}Eᵢᵥ | AlkLEᵥᵢᵢ | E₄* | Eₑ |
| 2107 | E₁ₐE₅Eᵢᵥ | AlkLEᵥᵢᵢ | E₄* | Eₑ |
| 2108 | E_{1b}E₅Eᵢᵥ | AlkLEᵥᵢᵢ | E₄* | Eₑ |
| 2109 | E₁ₐEᵢᵥE₄ | AlkLEᵥᵢᵢ | E₄* | Eₑ |
| 2110 | E_{1b}EᵢᵥE₄ | AlkLEᵥᵢᵢ | E₄* | Eₑ |
| 2111 | E₁ₐE₅EᵢᵥE₄ | AlkLEᵥᵢᵢ | E₄* | Eₑ |
| 2112 | E_{1b}E₅EᵢᵥE₄ | AlkLEᵥᵢᵢ | E₄* | Eₑ |
| 2113 | E₁ₐ | Eᵥᵢᵢ | | E_{f} |
| 2114 | E_{1b} | Eᵥᵢᵢ | | E_{f} |
| 2115 | E₁ₐE₅ | Eᵥᵢᵢ | | E_{f} |
| 2116 | E_{1b}E₅ | Eᵥᵢᵢ | | E_{f} |
| 2117 | E₁ₐEᵢ | Eᵥᵢᵢ | | E_{f} |
| 2118 | E_{1b}Eᵢ | Eᵥᵢᵢ | | E_{f} |
| 2119 | E₁ₐEᵢᵢ | Eᵥᵢᵢ | | E_{f} |
| 2120 | E_{1b}Eᵢᵢ | Eᵥᵢᵢ | | E_{f} |
| 2121 | E₁ₐEᵢᵢE_{iib} | Eᵥᵢᵢ | | E_{f} |
| 2122 | E_{1b}EᵢᵢE_{iib} | Eᵥᵢᵢ | | E_{f} |
| 2123 | E₁ₐE₅Eᵢ | Eᵥᵢᵢ | | E_{f} |
| 2124 | E_{1b}E₅Eᵢ | Eᵥᵢᵢ | | E_{f} |
| 2125 | E₁ₐE₅Eᵢᵢ | Eᵥᵢᵢ | | E_{f} |
| 2126 | E_{1b}E₅Eᵢᵢ | Eᵥᵢᵢ | | E_{f} |
| 2127 | E₁ₐE₅EᵢᵢE_{iib} | Eᵥᵢᵢ | | E_{f} |
| 2128 | E_{1b}E₅EᵢᵢE_{iib} | Eᵥᵢᵢ | | E_{f} |
| 2129 | E₁ₐE₄ | Eᵥᵢᵢ | | E_{f} |
| 2130 | E_{1b}E₄ | Eᵥᵢᵢ | | E_{f} |
| 2131 | E₁ₐE₅E₄ | Eᵥᵢᵢ | | E_{f} |
| 2132 | E_{1b}E₅E₄ | Eᵥᵢᵢ | | E_{f} |
| 2133 | E₁ₐEᵢE₄ | Eᵥᵢᵢ | | E_{f} |
| 2134 | E_{1b}EᵢE₄ | Eᵥᵢᵢ | | E_{f} |
| 2135 | E₁ₐEᵢᵢE₄ | Eᵥᵢᵢ | | E_{f} |
| 2136 | E_{1b}EᵢᵢE₄ | Eᵥᵢᵢ | | E_{f} |
| 2137 | E₁ₐEᵢᵢE_{iib}E₄ | Eᵥᵢᵢ | | E_{f} |
| 2138 | E_{1b}EᵢᵢE_{iib}E₄ | Eᵥᵢᵢ | | E_{f} |
| 2139 | E₁ₐE₅EᵢE₄ | Eᵥᵢᵢ | | E_{f} |
| 2140 | E_{1b}E₅EᵢE₄ | Eᵥᵢᵢ | | E_{f} |
| 2141 | E₁ₐE₅EᵢᵢE₄ | Eᵥᵢᵢ | | E_{f} |
| 2142 | E_{1b}E₅EᵢᵢE₄ | Eᵥᵢᵢ | | E_{f} |
| 2143 | E₁ₐE₅EᵢᵢE_{iib}E₄ | Eᵥᵢᵢ | | E_{f} |
| 2144 | E_{1b}E₅EᵢᵢE_{iib}E₄ | Eᵥᵢᵢ | | E_{f} |
| 2145 | E₁ₐEᵢᵢᵢ | Eᵥᵢᵢ | | E_{f} |
| 2146 | E_{1b}Eᵢᵢᵢ | Eᵥᵢᵢ | | E_{f} |
| 2147 | E₁ₐE₅Eᵢᵢᵢ | Eᵥᵢᵢ | | E_{f} |
| 2148 | E_{1b}E₅Eᵢᵢᵢ | Eᵥᵢᵢ | | E_{f} |
| 2149 | E₁ₐEᵢᵢᵢE₄ | Eᵥᵢᵢ | | E_{f} |
| 2150 | E_{1b}EᵢᵢᵢE₄ | Eᵥᵢᵢ | | E_{f} |
| 2151 | E₁ₐE₅EᵢᵢᵢE₄ | Eᵥᵢᵢ | | E_{f} |
| 2152 | E_{1b}E₅EᵢᵢᵢE₄ | Eᵥᵢᵢ | | E_{f} |
| 2153 | E₁ₐEᵢᵥ | Eᵥᵢᵢ | | E_{f} |
| 2154 | E_{1b}Eᵢᵥ | Eᵥᵢᵢ | | E_{f} |
| 2155 | E₁ₐE₅Eᵢᵥ | Eᵥᵢᵢ | | E_{f} |
| 2156 | E_{1b}E₅Eᵢᵥ | Eᵥᵢᵢ | | E_{f} |
| 2157 | E₁ₐEᵢᵥE₄ | Eᵥᵢᵢ | | E_{f} |
| 2158 | E_{1b}EᵢᵥE₄ | Eᵥᵢᵢ | | E_{f} |
| 2159 | E₁ₐE₅EᵢᵥE₄ | Eᵥᵢᵢ | | E_{f} |
| 2160 | E_{1b}E₅EᵢᵥE₄ | Eᵥᵢᵢ | | E_{f} |
| 2161 | E₁ₐ | Eᵥᵢᵢ | E₄* | E_{f} |
| 2162 | E_{1b} | Eᵥᵢᵢ | E₄* | E_{f} |
| 2163 | E₁ₐE₅ | Eᵥᵢᵢ | E₄* | E_{f} |
| 2164 | E_{1b}E₅ | Eᵥᵢᵢ | E₄* | E_{f} |
| 2165 | E₁ₐEᵢ | Eᵥᵢᵢ | E₄* | E_{f} |
| 2166 | E_{1b}Eᵢ | Eᵥᵢᵢ | E₄* | E_{f} |
| 2167 | E₁ₐEᵢᵢ | Eᵥᵢᵢ | E₄* | E_{f} |
| 2168 | E_{1b}Eᵢᵢ | Eᵥᵢᵢ | E₄* | E_{f} |
| 2169 | E₁ₐEᵢᵢE_{iib} | Eᵥᵢᵢ | E₄* | E_{f} |
| 2170 | E_{1b}EᵢᵢE_{iib} | Eᵥᵢᵢ | E₄* | E_{f} |
| 2171 | E₁ₐE₅Eᵢ | Eᵥᵢᵢ | E₄* | E_{f} |
| 2172 | E_{1b}E₅Eᵢ | Eᵥᵢᵢ | E₄* | E_{f} |
| 2173 | E₁ₐE₅Eᵢᵢ | Eᵥᵢᵢ | E₄* | E_{f} |
| 2174 | E_{1b}E₅Eᵢᵢ | Eᵥᵢᵢ | E₄* | E_{f} |
| 2175 | E₁ₐE₅EᵢᵢE_{iib} | Eᵥᵢᵢ | E₄* | E_{f} |
| 2176 | E_{1b}E₅EᵢᵢE_{iib} | Eᵥᵢᵢ | E₄* | E_{f} |
| 2177 | E₁ₐE₄ | Eᵥᵢᵢ | E₄* | E_{f} |
| 2178 | E_{1b}E₄ | Eᵥᵢᵢ | E₄* | E_{f} |
| 2179 | E₁ₐE₅E₄ | Eᵥᵢᵢ | E₄* | E_{f} |
| 2180 | E_{1b}E₅E₄ | Eᵥᵢᵢ | E₄* | E_{f} |
| 2181 | E₁ₐEᵢE₄ | Eᵥᵢᵢ | E₄* | E_{f} |
| 2182 | E_{1b}EᵢE₄ | Eᵥᵢᵢ | E₄* | E_{f} |
| 2183 | E₁ₐEᵢᵢE₄ | Eᵥᵢᵢ | E₄* | E_{f} |
| 2184 | E_{1b}EᵢᵢE₄ | Eᵥᵢᵢ | E₄* | E_{f} |
| 2185 | E₁ₐEᵢᵢE_{iib}E₄ | Eᵥᵢᵢ | E₄* | E_{f} |
| 2186 | E_{1b}EᵢᵢE_{iib}E₄ | Eᵥᵢᵢ | E₄* | E_{f} |
| 2187 | E₁ₐE₅EᵢE₄ | Eᵥᵢᵢ | E₄* | E_{f} |
| 2188 | E_{1b}E₅EᵢE₄ | Eᵥᵢᵢ | E₄* | E_{f} |
| 2189 | E₁ₐE₅EᵢᵢE₄ | Eᵥᵢᵢ | E₄* | E_{f} |
| 2190 | E_{1b}E₅EᵢᵢE₄ | Eᵥᵢᵢ | E₄* | E_{f} |
| 2191 | E₁ₐE₅EᵢᵢE_{iib}E₄ | Eᵥᵢᵢ | E₄* | E_{f} |
| 2192 | E_{1b}E₅EᵢᵢE_{iib}E₄ | Eᵥᵢᵢ | E₄* | E_{f} |
| 2193 | E₁ₐEᵢᵢᵢ | Eᵥᵢᵢ | E₄* | E_{f} |
| 2194 | E_{1b}Eᵢᵢᵢ | Eᵥᵢᵢ | E₄* | E_{f} |
| 2195 | E₁ₐE₅Eᵢᵢᵢ | Eᵥᵢᵢ | E₄* | E_{f} |
| 2196 | E_{1b}E₅Eᵢᵢᵢ | Eᵥᵢᵢ | E₄* | E_{f} |
| 2197 | E₁ₐEᵢᵢᵢE₄ | Eᵥᵢᵢ | E₄* | E_{f} |
| 2198 | E_{1b}EᵢᵢᵢE₄ | Eᵥᵢᵢ | E₄* | E_{f} |
| 2199 | E₁ₐE₅EᵢᵢᵢE₄ | Eᵥᵢᵢ | E₄* | E_{f} |
| 2200 | E_{1b}E₅EᵢᵢᵢE₄ | Eᵥᵢᵢ | E₄* | E_{f} |
| 2201 | E₁ₐEᵢᵥ | Eᵥᵢᵢ | E₄* | E_{f} |
| 2202 | E_{1b}Eᵢᵥ | Eᵥᵢᵢ | E₄* | E_{f} |
| 2203 | E₁ₐE₅Eᵢᵥ | Eᵥᵢᵢ | E₄* | E_{f} |
| 2204 | E_{1b}E₅Eᵢᵥ | Eᵥᵢᵢ | E₄* | E_{f} |
| 2205 | E₁ₐEᵢᵥE₄ | Eᵥᵢᵢ | E₄* | E_{f} |
| 2206 | E_{1b}EᵢᵥE₄ | Eᵥᵢᵢ | E₄* | E_{f} |
| 2207 | E₁ₐE₅EᵢᵥE₄ | Eᵥᵢᵢ | E₄* | E_{f} |
| 2208 | E_{1b}E₅EᵢᵥE₄ | Eᵥᵢᵢ | E₄* | E_{f} |
| 2209 | E₁ₐ | AlkLEᵥᵢᵢ | | E_{f} |
| 2210 | E_{1b} | AlkLEᵥᵢᵢ | | E_{f} |
| 2211 | E₁ₐE₅ | AlkLEᵥᵢᵢ | | E_{f} |
| 2212 | E_{1b}E₅ | AlkLEᵥᵢᵢ | | E_{f} |
| 2213 | E₁ₐEᵢ | AlkLEᵥᵢᵢ | | E_{f} |
| 2214 | E_{1b}Eᵢ | AlkLEᵥᵢᵢ | | E_{f} |
| 2215 | E₁ₐEᵢᵢ | AlkLEᵥᵢᵢ | | E_{f} |
| 2216 | E_{1b}Eᵢᵢ | AlkLEᵥᵢᵢ | | E_{f} |
| 2217 | E₁ₐEᵢᵢE_{iib} | AlkLEᵥᵢᵢ | | E_{f} |
| 2218 | E_{1b}EᵢᵢE_{iib} | AlkLEᵥᵢᵢ | | E_{f} |
| 2219 | E₁ₐE₅Eᵢ | AlkLEᵥᵢᵢ | | E_{f} |
| 2220 | E_{1b}E₅Eᵢ | AlkLEᵥᵢᵢ | | E_{f} |
| 2221 | E₁ₐE₅Eᵢᵢ | AlkLEᵥᵢᵢ | | E_{f} |
| 2222 | E_{1b}E₅Eᵢᵢ | AlkLEᵥᵢᵢ | | E_{f} |
| 2223 | E₁ₐE₅EᵢᵢE_{iib} | AlkLEᵥᵢᵢ | | E_{f} |
| 2224 | E_{1b}E₅EᵢᵢE_{iib} | AlkLEᵥᵢᵢ | | E_{f} |
| 2225 | E₁ₐE₄ | AlkLEᵥᵢᵢ | | E_{f} |
| 2226 | E_{1b}E₄ | AlkLEᵥᵢᵢ | | E_{f} |
| 2227 | E₁ₐE₅E₄ | AlkLEᵥᵢᵢ | | E_{f} |
| 2228 | E_{1b}E₅E₄ | AlkLEᵥᵢᵢ | | E_{f} |
| 2229 | E₁ₐEᵢE₄ | AlkLEᵥᵢᵢ | | E_{f} |
| 2230 | E_{1b}EᵢE₄ | AlkLEᵥᵢᵢ | | E_{f} |
| 2231 | E₁ₐEᵢᵢE₄ | AlkLEᵥᵢᵢ | | E_{f} |
| 2232 | E_{1b}EᵢᵢE₄ | AlkLEᵥᵢᵢ | | E_{f} |
| 2233 | E₁ₐEᵢᵢE_{iib}E₄ | AlkLEᵥᵢᵢ | | E_{f} |
| 2234 | E_{1b}EᵢᵢE_{iib}E₄ | AlkLEᵥᵢᵢ | | E_{f} |
| 2235 | E₁ₐE₅EᵢE₄ | AlkLEᵥᵢᵢ | | E_{f} |
| 2236 | E_{1b}E₅EᵢE₄ | AlkLEᵥᵢᵢ | | E_{f} |
| 2237 | E₁ₐE₅EᵢᵢE₄ | AlkLEᵥᵢᵢ | | E_{f} |
| 2238 | E_{1b}E₅EᵢᵢE₄ | AlkLEᵥᵢᵢ | | E_{f} |
| 2239 | E₁ₐE₅EᵢᵢE_{iib}E₄ | AlkLEᵥᵢᵢ | | E_{f} |
| 2240 | E_{1b}E₅EᵢᵢE_{iib}E₄ | AlkLEᵥᵢᵢ | | E_{f} |
| 2241 | E₁ₐEᵢᵢᵢ | AlkLEᵥᵢᵢ | | E_{f} |
| 2242 | E_{1b}Eᵢᵢᵢ | AlkLEᵥᵢᵢ | | E_{f} |
| 2243 | E₁ₐE₅Eᵢᵢᵢ | AlkLEᵥᵢᵢ | | E_{f} |
| 2244 | E_{1b}E₅Eᵢᵢᵢ | AlkLEᵥᵢᵢ | | E_{f} |
| 2245 | E₁ₐEᵢᵢᵢE₄ | AlkLEᵥᵢᵢ | | E_{f} |
| 2246 | E_{1b}EᵢᵢᵢE₄ | AlkLEᵥᵢᵢ | | E_{f} |
| 2247 | E₁ₐE₅EᵢᵢᵢE₄ | AlkLEᵥᵢᵢ | | E_{f} |
| 2248 | E_{1b}E₅EᵢᵢᵢE₄ | AlkLEᵥᵢᵢ | | E_{f} |
| 2249 | E₁ₐEᵢᵥ | AlkLEᵥᵢᵢ | | E_{f} |
| 2250 | E_{1b}Eᵢᵥ | AlkLEᵥᵢᵢ | | E_{f} |
| 2251 | E₁ₐE₅Eᵢᵥ | AlkLEᵥᵢᵢ | | E_{f} |
| 2252 | E_{1b}E₅Eᵢᵥ | AlkLEᵥᵢᵢ | | E_{f} |
| 2253 | E₁ₐEᵢᵥE₄ | AlkLEᵥᵢᵢ | | E_{f} |
| 2254 | E_{1b}EᵢᵥE₄ | AlkLEᵥᵢᵢ | | E_{f} |
| 2255 | E₁ₐE₅EᵢᵥE₄ | AlkLEᵥᵢᵢ | | E_{f} |
| 2256 | E_{1b}E₅EᵢᵥE₄ | AlkLEᵥᵢᵢ | | E_{f} |
| 2257 | E₁ₐ | AlkLEᵥᵢᵢ | E₄* | E_{f} |
| 2258 | E_{1b} | AlkLEᵥᵢᵢ | E₄* | E_{f} |
| 2259 | E₁ₐE₅ | AlkLEᵥᵢᵢ | E₄* | E_{f} |
| 2260 | E_{1b}E₅ | AlkLEᵥᵢᵢ | E₄* | E_{f} |
| 2261 | E₁ₐEᵢ | AlkLEᵥᵢᵢ | E₄* | E_{f} |
| 2262 | E_{1b}Eᵢ | AlkLEᵥᵢᵢ | E₄* | E_{f} |
| 2263 | E₁ₐEᵢᵢ | AlkLEᵥᵢᵢ | E₄* | E_{f} |
| 2264 | E_{1b}Eᵢᵢ | AlkLEᵥᵢᵢ | E₄* | E_{f} |
| 2265 | E₁ₐEᵢᵢE_{iib} | AlkLEᵥᵢᵢ | E₄* | E_{f} |
| 2266 | E_{1b}EᵢᵢE_{iib} | AlkLEᵥᵢᵢ | E₄* | E_{f} |
| 2267 | E₁ₐE₅Eᵢ | AlkLEᵥᵢᵢ | E₄* | E_{f} |
| 2268 | E_{1b}E₅Eᵢ | AlkLEᵥᵢᵢ | E₄* | E_{f} |
| 2269 | E₁ₐE₅Eᵢᵢ | AlkLEᵥᵢᵢ | E₄* | E_{f} |
| 2270 | E_{1b}E₅Eᵢᵢ | AlkLEᵥᵢᵢ | E₄* | E_{f} |
| 2271 | E₁ₐE₅EᵢᵢE_{iib} | AlkLEᵥᵢᵢ | E₄* | E_{f} |
| 2272 | E_{1b}E₅EᵢᵢE_{iib} | AlkLEᵥᵢᵢ | E₄* | E_{f} |
| 2273 | E₁ₐE₄ | AlkLEᵥᵢᵢ | E₄* | E_{f} |
| 2274 | E_{1b}E₄ | AlkLEᵥᵢᵢ | E₄* | E_{f} |
| 2275 | E₁ₐE₅E₄ | AlkLEᵥᵢᵢ | E₄* | E_{f} |
| 2276 | E_{1b}E₅E₄ | AlkLEᵥᵢᵢ | E₄* | E_{f} |
| 2277 | E₁ₐEᵢE₄ | AlkLEᵥᵢᵢ | E₄* | E_{f} |
| 2278 | E_{1b}EᵢE₄ | AlkLEᵥᵢᵢ | E₄* | E_{f} |
| 2279 | E₁ₐEᵢᵢE₄ | AlkLEᵥᵢᵢ | E₄* | E_{f} |
| 2280 | E_{1b}EᵢᵢE₄ | AlkLEᵥᵢᵢ | E₄* | E_{f} |
| 2281 | E₁ₐEᵢᵢE_{iib}E₄ | AlkLEᵥᵢᵢ | E₄* | E_{f} |
| 2282 | E_{1b}EᵢᵢE_{iib}E₄ | AlkLEᵥᵢᵢ | E₄* | E_{f} |
| 2283 | E₁ₐE₅EᵢE₄ | AlkLEᵥᵢᵢ | E₄* | E_{f} |
| 2284 | E_{1b}E₅EᵢE₄ | AlkLEᵥᵢᵢ | E₄* | E_{f} |
| 2285 | E₁ₐE₅EᵢᵢE₄ | AlkLEᵥᵢᵢ | E₄* | E_{f} |
| 2286 | E_{1b}E₅EᵢᵢE₄ | AlkLEᵥᵢᵢ | E₄* | E_{f} |
| 2287 | E₁ₐE₅EᵢᵢE_{iib}E₄ | AlkLEᵥᵢᵢ | E₄* | E_{f} |
| 2288 | E_{1b}E₅EᵢᵢE_{iib}E₄ | AlkLEᵥᵢᵢ | E₄* | E_{f} |
| 2289 | E₁ₐEᵢᵢᵢ | AlkLEᵥᵢᵢ | E₄* | E_{f} |
| 2290 | E_{1b}Eᵢᵢᵢ | AlkLEᵥᵢᵢ | E₄* | E_{f} |
| 2291 | E₁ₐE₅Eᵢᵢᵢ | AlkLEᵥᵢᵢ | E₄* | E_{f} |
| 2292 | E_{1b}E₅Eᵢᵢᵢ | AlkLEᵥᵢᵢ | E₄* | E_{f} |
| 2293 | E₁ₐEᵢᵢᵢE₄ | AlkLEᵥᵢᵢ | E₄* | E_{f} |
| 2294 | E_{1b}EᵢᵢᵢE₄ | AlkLEᵥᵢᵢ | E₄* | E_{f} |
| 2295 | E₁ₐE₅EᵢᵢᵢE₄ | AlkLEᵥᵢᵢ | E₄* | E_{f} |
| 2296 | E_{1b}E₅EᵢᵢᵢE₄ | AlkLEᵥᵢᵢ | E₄* | E_{f} |
| 2297 | E₁ₐEᵢᵥ | AlkLEᵥᵢᵢ | E₄* | E_{f} |
| 2298 | E_{1b}Eᵢᵥ | AlkLEᵥᵢᵢ | E₄* | E_{f} |
| 2299 | E₁ₐE₅Eᵢᵥ | AlkLEᵥᵢᵢ | E₄* | E_{f} |
| 2300 | E_{1b}E₅Eᵢᵥ | AlkLEᵥᵢᵢ | E₄* | E_{f} |
| 2301 | E₁ₐEᵢᵥE₄ | AlkLEᵥᵢᵢ | E₄* | E_{f} |
| 2302 | E_{1b}EᵢᵥE₄ | AlkLEᵥᵢᵢ | E₄* | E_{f} |
| 2303 | E₁ₐE₅EᵢᵥE₄ | AlkLEᵥᵢᵢ | E₄* | E_{f} |
| 2304 | E_{1b}E₅EᵢᵥE₄ | AlkLEᵥᵢᵢ | E₄* | E_{f} |

### Use of the Microorganisms According to the Invention

[0201] A further subject of the present invention relates to the use of the aforesaid microorganisms for the production of ω-functionalized carboxylic acids and ω-functionalized carboxylate esters, in particular of those carboxylic acids and carboxylate esters, which were emphasized above as preferable in connection with the microorganisms according to the invention, wherein as the ω-functionalization, ω-amination in particular is to be emphasized. The use of the aforesaid microorganisms for the production of ω-aminocarboxylic acids and ω-aminocarboxylate esters, in particular ω-aminolauric acid and methyl and ethyl ω-aminolaurates and ω-aminocaproic acid and methyl and ethyl ω-aminocaproates is particularly preferable.

[0202] Microorganisms emphasized as preferable in connection with the microorganisms according to the invention are also preferable in connection with the use according to the invention. Which organisms according to the invention are preferable for specific ω-functionalized carboxylic acids or ω-functionalized carboxylate esters has already been emphasized in connection with the microorganisms according to the invention.

Process for the Production of ω-Functionalized Carboxylic Acids and of ω-Functionalized carboxylate esters

[0203] A further subject of the present invention relates to a process for the production of ω-functionalized carboxylic acids and ω-functionalized carboxylate esters from a simple carbon source comprising the process steps

I) contacting a microorganism according to the invention with a medium containing the simple carbon source,
II) culturing the microorganism under conditions which enable the microorganism to form the ω-functionalized carboxylic acids or ω-functionalized carboxylate esters from the simple carbon source and
III) optionally isolation of the ω-functionalized carboxylic acids or ω-functionalized carboxylate esters formed.

[0204] In the process according to the invention, the microorganisms according to the invention can be contacted with the culture medium and cultured continuously or discontinuously in the batch process (batch culturing) or the fed-batch process or the repeated fed-batch process for the purpose of producing the ω-functionalized carboxylic acids or ω-functionalized carboxylate esters. Also possible is a semicontinuous process as described in GB-A-1009370. A summary of known culturing methods is described in the textbook by Chmiel (“Bioprozesstechnik 1. Einführung in die Bioverfahrenstechnik”, Gustav Fischer Verlag, Stuttgart, 1991) or in the textbook by Storhas (“Bioreaktoren and periphere Einrichtungen”, Vieweg Verlag, Braunschweig/Wiesbaden, 1994).

[0205] The culture medium to be used must appropriately meet the requirements of the respective strains. Descriptions of culture media for various microorganisms are contained in the American Society for Bacteriology manual “Manual of Methods for General Bacteriology” (Washington D.C., USA, 1981).

[0206] In the process according to the invention, microorganisms preferred according to the invention are preferably used.

[0207] As the simple carbon source in the process according to the invention, those mentioned above as preferable are used.

[0208] As the nitrogen source, organic nitrogen-containing compounds such as peptone, yeast extract, meat extract, malt extract, corn steep liquor, soya bean meal and urea or inorganic compounds such as ammonium sulphate, ammonium chloride, ammonium phosphate, ammonium carbonate and ammonium nitrate, ammonia, ammonium hydroxide or aqueous ammonia can be used. The nitrogen sources can be used singly or as a mixture.

[0209] As the phosphorus source, phosphoric acid, potassium dihydrogen phosphate or dipotassium hydrogen phosphate or the corresponding sodium-containing salts can be used. The culture medium must further contain salts of metals, such as for example magnesium sulphate or iron sulphate, which are necessary for growth. Finally, essential nutrients such as amino acids and vitamins can be used in addition to the abovementioned substances. Apart from this, suitable precursors can be added to the culture medium. The said additives can be added to the culture in the form of a single preparation or fed in during the culturing in a suitable manner.

[0210] For pH control of the culture, basic compounds such as sodium hydroxide, potassium hydroxide, ammonia or aqueous ammonia or acidic compounds such as phosphoric acid or sulphuric acid can be used in a suitable manner. To control foam development, antifoaming agents such as for example fatty acid polyglycol esters can be used. For maintenance of the stability of plasmids, suitable selectively acting substances such as for example antibiotics can be added to the media. In order to maintain aerobic conditions, oxygen or oxygen-containing gas mixtures such as for example air are introduced into the culture.

[0211] According to one embodiment of the process according to the invention, this is performed in a two-phase system, comprising

A) an aqueous phase, and
B) an organic phase,
wherein the formation of the ω-functionalized carboxylic acids or ω-functionalized carboxylate esters by the microorganism in process step II) takes place in the aqueous phase and the ω-functionalized carboxylic acids or ω-functionalized carboxylate esters formed accumulate in the organic phase. In this manner, it is possible to extract the ω-functionalized carboxylic acids or ω-functionalized carboxylate esters formed in situ.

[0212] Preferred ω-functionalized carboxylic acids or ω-functionalized carboxylate esters which are produced with the process according to the invention are those mentioned above as preferred in connection with the microorganisms according to the invention and the use according to the invention.

[0213] Especially preferred ω-functionalized carboxylic acids or ω-functionalized carboxylate esters are the

ω-aminocarboxylic acids and ω-aminocarboxylate esters, in particular ω-aminolauric acid and methyl and ethyl ω-aminolaurates and ω-aminocaproic acid and methyl and ethyl ω-aminocaproates, and
ω-hydroxycarboxylic acids and ω-hydroxycarboxylate esters, in particular ω-hydroxylauric acid and methyl and ethyl ω-hydroxylaurates and ω-hydroxycaproic acid and methyl and ethyl ω-hydroxycaproates, and
ω-carboxycarboxylic acids and ω-carboxycarboxylate esters, in particular ω-carboxylauric acid and methyl and ethyl ω-carboxylaurates, and ω-carboxycaproic acid and methyl and ethyl ω-carboxycaproates.

[0214] Which organisms according to the invention are preferably used in preferred processes according to the invention for specific ω-functionalized carboxylic acids or ω-functionalized carboxylate esters has already been emphasized in connection with the microorganisms according to the invention.

[0215] A further subject of the present invention is a process for the production of polyamides based on ω-aminocarboxylic acids, comprising the process steps:

(a1) Production of ω-aminocarboxylic acids or ω-aminocarboxylate esters by one of the processes described above for the production of ω-aminocarboxylic acids, in particular by the process described above for the production of ω-aminolauric acid, methyl ω-aminolaurate, ω-aminocaproic acid or methyl ω-aminocaproate and optionally conversion of the ω-aminocarboxylate esters into ω-aminocarboxylic acids;
(a2) Polymerization of the ω-aminocarboxylic acid with obtention of a polyamide.

[0216] In process step (a2) of the process according to the invention for the production of polyamides based on ω-aminocarboxylic acids, the ω-aminocarboxylate esters can be converted into the ω-aminocarboxylic acids by any processes such as for example acid- or base-catalysed hydrolysis.

[0217] In process step (a2) of the process according to the invention for the production of polyamides based on ω-aminocarboxylic acids, the ω-aminocarboxylic acids obtained in process step (a1), in particular the ω-aminolauric acid obtained in process step (a1), is converted to a polyamide in a polymerization wherein optionally mixtures of various ω-aminocarboxylic acids can also be used, whereof at least a part of the ω-aminocarboxylic acids, preferably at least 50 wt. % based on all ω-aminocarboxylic acids used in the process, but optionally also all ω-aminocarboxylic acids were produced by the process according to the invention for the production of ω-aminocarboxylic acids.

[0218] The production of the polyamides from the ω-aminocarboxylic acids can be effected in processes known per se, as for example described in L. Notarbartolo, Ind. Plast. Mod. 10 (1958) 2, p. 44, JP 01-074224, JP 01-051433, JP63286428, JP58080324 or JP60179425.

[0219] In the examples presented below, the present invention is described by way of example, without it being intended that the invention, the scope of whose application appears from the whole description and claims, be limited to the embodiments mentioned in the examples.

### EXAMPLES

### Example 1

### Production of Expression Vectors for the Genes fatB2 from Cuphea palustris, Ald from Bacillus subtilis and Cv_{—}2025 from Chromobacterium violaceum

[0220] For the production of an E. coli expression vector for the genes fatB2 (SEQ ID No. 10) from Cuphea palustris (enzyme Eᵢ), aid (SEQ ID No. 11) from Bacillus subtilis (enzyme E₃) and Cv_{—}2025 (SEQ ID No. 12) from Chromobacterium violaceum (enzyme E₂), these genes were successively cloned into the vector pJ294 (DNA2.0 Inc., Menlo Park, Calif., USA). The gene Cv_{—}2025 was synthesized together with a lacUV5 promoter and the gene ald from Bacillus sphaericus and simultaneously a cleavage site upstream of the promoter and a cleavage site downstream of the terminator were introduced. The synthesized DNA fragment P_{lacUV5}-. ald_Bsp_TA_C.v.(Ct) (SEQ ID No. 13) was digested with the restriction endonucleases PstI and XbaI and ligated into the correspondingly cleaved vector pJ294. The finished E. coli expression vector was designated as pJ294_alaD_Bsp_TA_C.v.(Ct).(SEQ ID No. 14). In this vector, the Bacillus sphaericus ald gene was replaced by the gene ald from Bacillus subtilis. The gene ald was amplified by PCR from chromosomal DNA of the strain Bacillus subtilis str. 168. The following oligonucleotides were used in this:

| | |
|---|---|
| alaDH_pCR22_fw: | 5′-ATGATCATAGGGGTTCCTAAAGAG-3′ |
| | (SEQ ID No. 15) |
| alaDH_pCR22_rev: | 5′-TTAAGCACCCGCCACAGATG-3′ |
| | (SEQ ID No. 16) |

[0221] The following parameters were used for the PCR: 1×: initial denaturation, 98° C., 0:30 mins; 35×: denaturation, 98° C., 0:10 min, annealing, 65° C., 0:30 mins; elongation, 72° C., 0:20 mins; 1×: terminal elongation, 72° C., 10 min. For the amplification, the Phusion™ High-Fidelity Master Mix from New England Biolabs (Frankfurt) was used according to the manufacturer's recommendations. 50 μl of each PCR reaction were then separated on a 1% TAE agarose gel.

[0222] The PCR, agarose gel electrophoresis, ethidium bromide staining of the DNA and determination of the PCR fragment sizes were performed in the manner known to those skilled in the art. The PCR fragment exhibited the expected size of 1137 base-pairs and was purified from the PCR preparation with the Quick PCR Purification Kit from Qiagen (Hilden) according to the manufacturer's instructions. For the ligation of the PCR product with the vector, 5′-phosphates were attached to the PCR product by means of polynucleotide kinase (New England Biolabs, Frankfurt). For this, the manufacturer's recommendation was followed.

[0223] The vector was digested with the restriction endonucleases HindIII and NdeI, whereby the contained gene Bacillus sphaericus ald was removed. The restriction digestion mixture was separated on a 1% TAE agarose gel. Two bands, of sizes 5696 bp and 1124 bp could be identified. For the isolation of the vector-DNA from the agarose gel, the DNA band of 5696 bp was isolated from the gel with a scalpel and purified with the Quick Gel Extraction Kit from Qiagen (Hilden) according to the manufacturer's instructions. To create blunt ends, the 5′ overhangs of the purified vector DNA were filled in by means of the Klenow fragment of DNA polymerase I (New England Biolabs, Frankfurt). For this, the manufacturer's instructions were followed. The DNA fragment Bacillus subtilis ald with 5′ phosphate residues was ligated into the vector with blunt ends. The finished E. coli expression vector was designated as pJ294_alaDH_B.s._TA_C.v.(Ct) (SEQ ID No. 17).

[0224] For the production of the complete expression vector, the gene fatB2 from Cuphea palustris was codon-optimized for expression in Escherichia coli. The gene was synthesized together with a tac promoter (DNA 2.0; Menlo Park, Calif., USA) and simultaneously a cleavage site upstream of the promoter and a cleavage site downstream of the terminator were introduced.

[0225] The synthesized DNA fragment P_{tac}-CpFatB2 (SEQ ID No. 18) was digested with the restriction endonucleases BamHI and NotI and ligated into the correspondingly cleaved vector pJ294_alaDH_B.s._TA_C.v.(Ct) and the vector pJ294. The finished vectors were designated as pJ294[alaDH_B.s._TA_C.v.(Ct)_Ptac-CpFATB2] (SEQ ID No. 19) and pJ294[Ptac-CpFATB2_optEc] (SEQ ID No. 20).

### Example 2

### LC-ESI/MS²-Based Quantification of Products

[0226] The quantification of methyl laurate LSME, methyl ω-hydroxylaurate HLSME, methyl ω-oxolaurate OLSME, methyl ω-aminolaurate ALSME and methyl ω-carboxylaurate DDSME, ω-aminolauric acid ALS, ω-carboxylauric acid DDS, lauric acid LS, ω-hydroxylauric acid HLS and ω-oxolauric acid OLS in fermentation samples was effected by means of LC-ESI/MS² on the basis of an external calibration for all analytes and with use of the internal standard aminoundecanoic acid (AUD).

[0227] For this, the following instruments were used:
[0228] HPLC unit 1260 (Agilent; Böblingen) with autosampler (G1367E), binary pump (G1312B) and column oven (G1316A)
[0229] Mass spectrometer TripelQuad 6410 (Agilent; Böblingen) with ESI source
[0230] HPLC column: Kinetex C18, 100×2.1 mm, particle size: 2.6 μm, pore size 100 Å (Phenomenex; Aschaffenburg)
[0231] Precolumn: KrudKatcher Ultra HPLC in-line filter; 0.5 μm filter depth and 0.004 mm internal diameter (Phenomenex; Aschaffenburg)

[0232] The samples were prepared by pipetting 1900 μL of solvent (acetone/0.1 N HCl mixture=1:1) and 100 μL of sample into a 2 mL reaction vessel. The mixture was vortexed for ca. 10 seconds and then centrifuged at ca. 13,000 rpm for 5 mins. The clear supernatant was withdrawn with a pipette and analysed after appropriate dilution with diluent (80% (v/v) ACN, 20% bidest. H₂O (v/v), +0.1% formic acid). 100 μL of ISTD were pipetted into each 900 μL sample (10 μL with a sample volume of 90 μL).

[0233] The HPLC separation was effected with the aforementioned column and precolumn. The injection volume was 0.7 μL, the column temperature 50° C. and the flow rate 0.6 ml/min. The mobile phase consisted of eluent A (0.1% (v/v) aqueous formic acid) and eluent B (acetonitrile with 0.1% (v/v) formic acid). The following gradient profile was used

| Time [mins] | Eluent A [%] | Eluent B [%] |
|---|---|---|
| 0 | 77 | 23 |
| 0.3 | 77 | 23 |
| 0.4 | 40 | 60 |
| 2.5 | 40 | 60 |
| 2.6 | 2 | 98 |
| 5.5 | 2 | 98 |
| 5.6 | 77 | 23 |
| 9 | 77 | 23 |

[0234] The ESI-MS² analysis was effected in positive mode with the following ESI source parameters:
[0235] Gas temperature 280° C.
[0236] Gas flow rate 11 l/min
[0237] Nebulizer pressure 50 psi
[0238] Capillary voltage 4000 V

[0239] The detection and quantification of the individual compounds was effected with the following parameters, wherein in each case one product ion was used as Qualifier and one as Quantifier

| | Precursor | Product | Dwell | Collision |
|---|---|---|---|---|
| Analyte | Ion | Ion | time | energy |
| DDSME | 245.2 | 167.1 | 25 | 6 |
| DDSME | 245.2 | 149.1 | 50 | 8 |
| HLSME | 231.3 | 181.2 | 15 | 2 |
| HLSME | 231.3 | 163.2 | 25 | 5 |
| DDS | 231.2 | 213.2 | 50 | 0 |
| DDS | 231.2 | 149.1 | 25 | 9 |
| ALSME | 230.3 | 198.1 | 25 | 10 |
| ALSME | 230.3 | 163.2 | 15 | 10 |
| OLSME | 229.2 | 197.2 | 50 | 0 |
| OLSME | 229.2 | 161.1 | 25 | 5 |
| HLS | 217.2 | 181.2 | 35 | 0 |
| HLS | 217.2 | 163.1 | 20 | 4 |
| OLS | 215.2 | 161.2 | 25 | 0 |
| OLS | 215.2 | 95.2 | 60 | 13 |

### Example 3

### Production of Aminolauric Acid by an E. coli Strain with Deletion of the Gene fadE and Expression Vectors for the Genes fatB2 from Cuphea Palustris, Ald from Bacillus subtilis, and Cv_{—}2025 from Chromobacterium violaceum in Combination with an Expression Vector for the Genes alkB, alkG, alkT and alkL from the alk Operon of Pseudomonas putida

[0240] The host strain used E. coli JW5020-1 (CGSC, The coli genetic stock center, Yale University, New Haven, USA) is an E. coli BW25113 derivative which carries a deletion of the gene fadE (coding for enzyme E_{b}). The gene fadE was replaced by a kanamycin cassette. Before the provision of the strain with the expression vectors by means of a helper plasmid which codes for the Flp recombinase, this was removed in a manner known to those skilled in the art (see Datsenko K. A. and Wanner B. L. (2000) PNAS 97(12):6640-6645), resulting in the strain E. coli JW5020-1 Kan^{S}. To create an E. coli strain with expression vectors for the genes fatB2 from Cuphea palustris (enzyme Eᵢ), a/d from Bacillus subtilis (enzyme E₃), and Cv_{—}2025 from Chromobacterium violaceum (enzyme E₂) in combination with the expression vector pBT10_alkL (sequence and production: compare Example 1 of PCT/EP2011/053834 and the Seq ID No. 8 listed there) for the genes alkB (enzyme E₁ₐ), alkG, alkT (auxiliary enzymes to enzyme E_{1b}) and alkL (coding for alkL gene product) from the alk operon of Pseudomonas putida GPo1, electrocompetent cells of E. coli JW5020-1 Kan^{S} were produced. This took place in a manner known to those skilled in the art. This was transformed with the plasmids pJ294[alaDH_B.s._TA_C.v.(Ct)_Ptac-CpFATB2] and pBT10_alkL and plated out onto LB agar plates containing ampicillin (100 μg/ml) and kanamycin (50 μg/ml). Transformants were checked for the presence of the correct plasmids by plasmid preparation and analytical restriction analysis. In this manner, the following strain was constructed: E. coli JW5020-1 Kan^{S} pBT10_alkL/pJ294[alaDH_B.s._TA_C.v.(Ct)_Ptac-CpFATB2].

[0241] The strain was subjected to a fed-batch fermentation in order to analyse its capacity for the production of aminolauric acid from glucose. The strain to be tested was firstly grown from a glycerine culture as a preculture in M9 medium containing 100 μg/ml ampicillin and 50 μg/ml kanamycin at 37° C. overnight. The medium, consisting of 38 mM disodium hydrogen phosphate dihydrate, 22 mM potassium dihydrogen phosphate, 8.6 mM sodium chloride, 37 mM ammonium chloride, 1.5% (w/v) glucose, 2 mM magnesium sulphate heptahydrate (all substances from Merck, Darmstadt) and 0.5% (v/v) trace element solution, was adjusted to a pH of 7.4 with 25% ammonium hydroxide solution. The trace element solution added, consisting of 9.7 mM manganese(II) chloride tetrahydrate, 6.5 mM zinc sulphate heptahydrate, 2.5 mM sodium EDTA (Titriplex III), 4.9 mM boric acid, 1 mM sodium molybdate dihydrate, 32 mM calcium chloride dihydrate, 64 mM iron(II) sulphate heptahydrate and 0.9 mM copper(II) chloride dihydrate dissolved in 37% hydrochloric acid (all substances from Merck, Darmstadt) was sterile-filtered before addition to the M9 medium. The fermenter was inoculated with the preculture such that an optical density of 0.06 was reached. The culturing was effected at a pH of 6.8, regulated with 25% aqueous ammonia and 0.5 M sulphuric acid, an oxygen partial pressure of 20%, regulated via a stirrer speed of 800 rpm/min and air feed of 0.4 vvm/min at the start of the fermentation, and a temperature of 37° C. The glucose feed took place after consumption of the glucose present in the medium, at a feed rate of 5 g/l/hr based on the initial volume. At the start of the glucose feed after 9 hours fermentation, the temperature was adjusted to 30° C. The gene expression was induced 2 hours after the start of the glucose feed by addition of 1 mM isopropyl-β-D-thiogalactopyranoside and 0.025% dicyclopropyl ketone. The strain was cultured for a further 49 hours under constant conditions. During the culturing, 1 ml samples were withdrawn and the concentration of fatty acids and ω-functionalized fatty acids quantified by the method described in Example 2. The results are shown in the following table.

| C_{lauric acid} | C_{carboxylauric acid} | C_{hydroxylauric acid} | C_{aminolauric acid} |
|---|---|---|---|
| [mg/l] | [mg/l] | [mg/l] | [mg/l] |
| 56.5 | 16.0 | 54.4 | 22.8 |

[0242] Production of ω-functionalized fatty acids with E. coli JW5020-1 Kan^{S} pBT10_alkL/pJ294[alaDH_Bs_TAcv(ct_Ptac-CpFATB2]. The concentrations of lauric acid and ω-carboxylauric acid, ω-hydroxylauric acid and ω-aminolauric acid after 60 hours fermentation are stated:

### Example 4

### Production of an E. coli Expression Vector for the Genes fadD from Escherichia coli and atfA from Acinetobacter sp. ADP1

[0243] For the production of the E. coli expression vector for the genes fadD (SEQ ID No. 21) from Escherichia coli (coding for enzyme Eᵥ) and atfA with terminator (SEQ ID No. 22) from Acinetobacter sp. ADP1 (coding for enzyme Eᵥ) under control of a tac promoter, these genes were amplified from chromosomal DNA of E. coli W3110 and Acinetobacter calcoaceticus ADP1 respectively by PCR with incorporation of homologous regions for the recombination cloning.

[0244] The synthetic tac promoter (SEQ ID No. 23) was amplified with ribosome binding site from a pJ294 derivative (DNA 2.0; Menlo Park, Calif., USA) with incorporation of homologous regions.

[0245] The preparation of the chromosomal DNA from E. coli W3110 and Acinetobacter calcoaceticus ADP1 was effected by means of DNeasy Blood & Tissue Kit (Qiagen, Hilden) according to the manufacturer's instructions. In the amplification of the genes fadD from E. coli and atfA from Acinetobacter sp. ADP1 with chromosomal DNA of E. coli W3110 and Acinetobacter calcoaceticus ADP1 respectively as matrix, and the amplification of the synthetic promoter P_{tac} from a pJ294 derivative the following oligonucleotides were used:

Ptac:

| | |
|---|---|
| 11- | 5′-TTATGCGACTCCTGCGTTTAGGGAAAGAGCATTTG-3′ |
| 001_fw: | (SEQ ID No. 24) |
| Ptac-rv: | 5′-GTTAACATATGTTTTACCTCCTGTTAAACAAA-3′ |
| | (SEQ ID No. 25) |

fadD [E. coli]:

| | |
|---|---|
| fad D- | 5′-TAAAACATATGTTAACGGCATGTATATCATTT-3′ |
| fw: | (SEQ ID No. 26) |
| fadD-rv: | 5′-TCTCCTCAGACTTAACGCTCAGGCTTTATTGT-3′ |
| | (SEQ ID No. 27) |

atfA [Acinetobacter sp. ADP1]:

| | |
|---|---|
| atfA-fw: | 5′-GTTAAGTCTGAGGAGATCCACGCTATGCGCCC-3′ |
| | (SEQ ID No. 28) |
| 11- | 5′-CAATTGAGATCTGCCACGACTGCAATGGTTCATC-3′ |
| 002_rv: | (SEQ ID No. 29) |

[0246] The following parameters were used for the PCR: 1×: initial denaturation, 103° C., 3:00 mins; 35×: denaturation, 98° C., 0:10 mins, annealing, 65° C., 0:15 min; elongation, 72° C., 0:45 mins; 1×: terminal elongation, 72° C., 10 mins. For the amplification, the Phusion™ High-Fidelity Master Mix from New England Biolabs (Frankfurt) was used according to the manufacturer's recommendations. 50 μl of each PCR reaction were then separated on a 1% TAE agarose gel. The PCR, agarose gel electrophoresis, ethidium bromide staining of the DNA and determination of the PCR fragment sizes were performed in the manner known to those skilled in the art.

[0247] In all cases, PCR fragments of the expected size could be amplified. These were: for the promoter region P_{tac} 607 bp, for fadD 1778 bp and for atfA 1540 bp.

[0248] For the isolation of the DNA from an agarose gel, the target DNA was isolated from the gel with a scalpel and purified with the Quick Gel Extraction Kit from Qiagen (Hilden) according to the manufacturer's instructions. The purified PCR products were recombined with the EcoNI/NdeI-cleaved vector pCDFDuet™-1 (71340-3, Merck, Darmstadt) by means of in vitro cloning with use of the Geneart Seamless Cloning and Assembly Kit from Invitrogen (Darmstadt). The use corresponded to the manufacturer's recommendations. pCDFDuet-1 is an E. coli vector which mediates a spectinomycin/streptomycin resistance in the organism and carries a CoIDF13 replication origin. The transformation of chemically competent E. coli DH5α cells (New England Biolabs, Frankfurt) was effected in a manner known to those skilled in the art.

[0249] The correctness of the plasmid was checked by a restriction analysis with XbaI. The authenticity of the inserted fragments was checked by DNA sequencing. The finished E. coli expression vector was designated as pCDF[fadD-atfA] (SEQ ID No. 30).

### Example 5

### Production of Methyl Aminolaurate and Ethyl Aminolaurate by an E. coli Strain with Deletion of the Gene fadE and Expression Vectors for the Genes fatB2 from Cuphea palustris, Ald from Bacillus subtilis, and Cv_{—}2025 from Chromobacterium violaceum in Combination with an Expression Vector for the Genes alkB, alkG, alkT and alkL from the Alk Operon of Pseudomonas putida and an Expression Vector for the Genes fadD from Escherichia coli and atfA from Acinetobacter sp. ADP1

[0250] To create an E. coli strain with expression vectors for the genes fatB2 from Cuphea palustris (coding for enzyme Eᵢ), a/d from Bacillus subtilis (coding for enzyme E₃) and Cv_{—}2025 from Chromobacterium violaceum (coding for enzyme E₂) in combination with an expression vector for the genes alkB (coding for enzyme E_{1b}), alkG, alkT (coding for auxiliary enzymes to enzyme E_{1b}) and alkL (coding for alkL gene product) from the alk operon of Pseudomonas putida GPo1 and an expression vector for the genes fadD from Escherichia coli (coding for enzyme Eᵥᵢ) and atfA from Acinetobacter sp. ADP1 (coding for enzyme Eᵥ), electrocompetent cells of E. coli JW5020-1 Kan^{S} are produced. This takes place in a manner known to those skilled in the art. E. coli JW5020-1 Kan^{S} is a derivative of E. coli JW5020-1 (CGSC, The coli genetic stock center, Yale University, New Haven, USA), and this in turn is an E. coli BW25113 derivative which carries a deletion of the gene fadE (coding for enzyme E_{b}). The gene fadE was replaced by a kanamycin cassette. Before the provision of the strain with the expression vectors by means of a helper plasmid, which codes for the Flp recombinase, this was removed in a manner known to those skilled in the art (see Datsenko K. A. and Wanner B. L. (2000) PNAS 97(12):6640-6645), resulting in the strain E. coli JW5020-1 Kan^{S}. E. coli JW5020-1 Kan^{S} and E. coli W3110 ΔfadE (construction described in Example 8) are sequentially transformed with the plasmids pBT10_alkL, pCDF[fadD-atfA] and pJ294[alaDH_B.s._TA_C.v.(Ct)_Ptac-CpFATB2] and plated out onto LB agar plates containing kanamycin (50 μg/ml), spectinomycin (100 μg/ml) and ampicillin (100 μg/ml). Transformants are checked for the presence of the correct plasmids by plasmid preparation and analytical restriction analysis. In this manner, the following strains are constructed: E. coli JW5020-1 Kan^{S} pBT10_alkL/pCDF[fadD-atfA]/pJ294[alaDH_B.s._TA_C.v.(Ct)_Ptac-CpFATB2] and E. coli W3110 ΔfadE pBT10_alkL/pCDF[fadD-affA]/pJ294[alaDH_B.s._TA_C.v.(Ct)_Ptac-CpFATB2].

[0251] The strain is subjected to fed-batch fermentation in order to analyse its capacity for the production of methyl aminolaurate and ethyl aminolaurate from glucose. The strain to be tested is firstly grown from a glycerine culture as a preculture in M9 medium containing kanamycin (50 μg/ml), spectinomycin (100 μg/ml) and ampicillin (100 μg/ml) at 37° C. overnight. The medium, consisting of 38 mM disodium hydrogen phosphate dihydrate, 22 mM potassium dihydrogen phosphate, 8.6 mM sodium chloride, 37 mM ammonium chloride, 1.5% (w/v) glucose, 2 mM magnesium sulphate heptahydrate (all substances from Merck, Darmstadt) and 0.5% (v/v) trace element solution, is adjusted to a pH of 7.4 with 25% ammonium hydroxide solution. The trace element solution added, consisting of 9.7 mM manganese(II) chloride tetrahydrate, 6.5 mM zinc sulphate heptahydrate, 2.5 mM sodium EDTA (Titriplex III), 4.9 mM boric acid, 1 mM sodium molybdate dihydrate, 32 mM calcium chloride dihydrate, 64 mM iron(II) sulphate heptahydrate and 0.9 mM copper(II) chloride dihydrate dissolved in 37% hydrochloric acid (all substances from Merck, Darmstadt), is sterile-filtered before addition to the M9 medium. The fermenter is inoculated with the preculture such that an optical density of 0.2 is reached. The culturing is effected at a pH of 6.8, regulated with 25% aqueous ammonia and 0.5 M sulphuric acid, an oxygen partial pressure of 20%, regulated via the stirrer speed and the air feed, and a temperature of 37° C. The glucose feed is effected after consumption of the glucose present in the medium, at a feed rate of 5 g/l/hr based on the initial volume. At the start of the glucose feed, the temperature is adjusted to 30° C. Gene expression is induced 2 hours after the start of the glucose feed by addition of 1 mM isopropyl-β-D-thiogalactopyranoside and 0.025% dicyclopropyl ketone. Simultaneously with the induction, 2% (v/v) methanol or 2% (v/v) ethanol are added as methyl group donor or ethyl group donor for the fatty acid esterification.

[0252] The strain is cultured for at least a further 48 hours under constant conditions. During the culturing, 1 ml samples are withdrawn and the concentration of fatty acid methyl esters, fatty acid ethyl esters, ω-functionalized fatty acid methyl esters and ω-functionalized fatty acid ethyl esters quantified by the method described in Example 2. It is shown that the strains E. coli JW5020-1 Kan^{S} pBT10_alkL/pCDF[fadD-atfA]/pJ294[alaDH_B.s._TA_C.v.(Ct)_Ptac-CpFATB2] and E. coli W3110 ΔfadE pBT10_alkL/pCDF[fadD-atfA]/pJ294[alaDH_B.s._TA_C.v.(Ct)_Ptac-CpFATB2] are capable of forming methyl laurate, methyl ω-hydroxylaurate, methyl ω-oxolaurate, methyl ω-aminolaurate and methyl ω-carboxylaurate with addition of 2% (v/v) methanol and ethyl laurate, ethyl ω-hydroxylaurate, ethyl ω-oxolaurate, ethyl ω-aminolaurate and ethyl ω-carboxylaurate with addition of 2% (v/v) ethanol respectively.

### Example 6

### Production of Expression Vectors for the Genes synUcTE from Umbellularia californica, Ald from Bacillus subtilis and Cv_{—}2025 from Chromobacterium violaceum

[0253] For the production of an E. coli expression vector for the genes synUcTE (SEQ ID No. 31) from Umbellularia californica (coding for an enzyme Eᵢ), aid (SEQ ID No. 33) from Bacillus subtilis (coding for an enzyme E₃) and Cv_{—}2025 (SEQ ID No. 35) from Chromobacterium violaceum (coding for an enzyme E₂), the gene synUcTE was codon-optimized for expression in Escherichia coli and synthesized together with a tac promoter (SEQ ID No. 37). During the synthesis, a cleavage site upstream of the promoter and a cleavage site downstream of the terminator were introduced. The synthesized DNA fragment P_{tac} synUcTE was digested with the restriction endonucleases BamHI and NotI and ligated into the correspondingly cleaved vector pJ294_alaDH_B.s._TA_C.v.(Ct) (SEQ ID No. 17) and the vector pJ294 (DNA2.0 Inc., Menlo Park, Calif., USA). The finished vectors were designated as pJ294[alaDH_B.s._TA_C.v.(Ct)_Ptac-synUcTE] (SEQ ID No. 38) and pJ294[Ptac-synUcTE] (SEQ ID No. 39).

### Example 7

### Production of Expression Vectors for the Genes fadD from Escherichia coli and Wax-dgaT from Acinetobacter sp. ADP1 and atfA1 from Alcanivorax borkumensis

[0254] For the production of expression vectors for the genes fadD (SEQ ID No. 21) from Escherichia coli and wax-dgaT (SEQ ID No. 42) (coding for an enzyme Eᵥ) from Acinetobacter sp. ADP1 and atfA1 (SEQ ID No. 44) (coding for an enzyme Eᵥ) from Alcanivorax borkumensis SK2 respectively, the genes wax-dgaT and atfA1 were codon-optimized for expression in Escherichia coli and synthesized in combination with the Gen fadD from E. coli (coding for an enzyme Eᵥᵢ). The synthesized DNA fragments wax-dgaT_AsADP1-fadD_Ec (SEQ ID No. 46) and atfA1_Ab-fadD_Ec (SEQ ID No. 47) were amplified with incorporation of homologous regions for recombination cloning.

[0255] For the amplification of the fragment wax-dgaT_AsADP1-fadD_Ec the following oligonucleotides were used:

| wax-dgaT_H1_fw: | 5′-ACAGGAGGTAAAACATATGCGTCCTCTGCACCCG-3′ |
|---|---|
| | (SEQ ID No. 51) |
| fadD_H2_rv: | 5′-GTTTCTTTACCAGACTCGAGATTGTTTTCTCTTTAGTGGGCGTC-3′ |
| | (SEQ ID No. 52) |
| For the amplification of the fragment atfALAb-fadD Ec the following | |
| oligonucleotides were used: | |
| affA_Abfw_kurz: | 5′-ACAGGAGGTAAAACATATGAAAGCGCTGTCCC-3′ |
| | (SEQ ID No. 53) |
| fadD_H2_rv_N: | 5′-GTTTCTTTACCAGACTCGAGATIGTTTTCTCTTTAGTGGGC-3′ |
| | (SEQ ID No. 54) |

[0256] The following parameters were used for the PCR: 1×: initial denaturation, 98° C., 0:30 mins; 35×: denaturation, 98° C., 0:10 min, annealing, 70° C., 0:20 mins; elongation, 72° C., 1 min; 1×: terminal elongation, 72° C., 10 min. For the amplification, the Phusion™ High-Fidelity Master Mix from New England Biolabs (Frankfurt) was used according to the manufacturer's recommendations. 50 μl of each PCR reaction were then separated on a 1% TAE agarose gel. The PCR, agarose gel electrophoresis, ethidium bromide staining of the DNA and determination of the PCR fragment sizes were performed in the manner known to those skilled in the art. In both cases, PCR fragments of the expected size could be amplified. These were 3192 base pairs for wax-dgaT_AsADP1-fadD_Ec and 3189 base pairs for atfA1_Ab-fadD_Ec. For the isolation of the DNA from the agarose gel, the target DNA was cut out from the gel with a scalpel and purified with the QiaQuick Gel extraction Kit according to the manufacturer's instructions (Qiagen, Hilden). The purified PCR products were cloned into a NdeI- and XhoI-cleaved pCDF derivative, which already contains a synthetic tac promoter (SEQ ID No. 50), by means of recombination with use of the Geneart® Seamless Cloning and Assembly Kit according to the manufacturer's instructions (Life Technologies, Carlsbad, Calif., USA). The transformation of chemically competent E. coli DH5α (New England Biolabs, Frankfurt) was effected in a manner known to those skilled in the art. The correct insertion of the target genes was checked by restriction analysis and the authenticity of the incorporated genes confirmed by DNA sequencing. The resulting expression vectors were designated as pCDF[wax-dgaT_AsADP1(co_Ec)-fadD_Ec] (SEQ ID No. 48) and pCDF[atfA1_Ab(co_Ec)-fadD_Ec] (SEQ ID No. 49).

### Example 8

### Production of Methyl Aminolaurate by an E. coli Strain with Deletion in the Gene fadE and Expression Vectors for the Genes synUcTE from Umbellularia californica, Ald from Bacillus subtilis, and Cv_{—}2025 from Chromobacterium violaceum in Combination with an Expression Vector for the Genes alkB, alkG, alkT and alkL from the alk operon of Pseudomonas putida and an Expression Vector for the Genes fadD from Escherichia coli and Wax-dgaT from Acinetobacter sp. ADP1 or atfA1 from Alcanivorax borkumensis

[0257] Firstly, an E. coli strain with deletion in the gene fadE (SEQ ID No. 40) was constructed. For the production of the gene deletion, a plasmid was constructed which carries the DNA sequence ΔfadE (SEQ ID No. 55). This sequence was synthesized and consists of homologous regions 500 base pairs upstream and downstream from the fadE gene and the recognition sequence for the restriction endonuclease NotI at the 5′ and 3′ end. The sequence ΔfadE was digested with the restriction endonuclease NotI and ligated into the correspondingly cleaved vector pKO3. The strain E. coli W3110 ΔfadE was constructed by means of the pKO3-ΔfadE construct (SEQ ID No. 56) by methods known to those skilled in the art (see Link A J, Phillips D, Church G M. J. Bacteriol. 1997. 179(20)). The DNA sequence of fadE after deletion is reproduced in SEQ ID No. 57.

[0258] To create an E. coli strain with expression vectors for the genes synUcTE from Umbellularia californica, ald from Bacillus subtilis, and Cv_{—}2025 from Chromobacterium violaceum in combination with an expression vector for the genes alkB (enzyme E₁ₐ), alkG, alkT (auxiliary enzymes to enzyme E_{1b}) and alkL (coding for alkL gene product) from the alk operon of Pseudomonas putida GPo1 and an expression vector for the genes fadD from Escherichia coli and wax-dgaT from Acinetobacter sp. ADP1 or atfA1 from Alcanivorax borkumensis SK2, electrocompetent cells of E. coli W3110 ΔfadE were produced. This took place in a manner known to those skilled in the art. E. coli W3110 ΔfadE was sequentially transformed with the plasmids pBT10_alkL (sequence and production: compare Example 1 of PCT/EP2011/053834 and the Seq ID No. 8 listed there), pJ294[alaDH_B.s._TA_C.v.(Ct)_Ptac-synUcTE] (SEQ ID No. 38) and pCDF[wax-dgaT_AsADP1(co_Ec)-fadD_Ec] (SEQ ID No. 48) and pCDF[atfA1_Ab(co_Ec)-fadD_Ec] (SEQ ID No. 49) respectively and plated out onto LB agar plates containing kanamycin (50 μg/ml), ampicillin (100 μg/ml) and spectinomycin (100 μg/ml). Transformants were checked for the presence of the correct plasmids by plasmid preparation and analytical restriction analysis. In this manner the following strains were constructed:

E. coli W3110 ΔfadE pBT10_alkL/pJ294[alaDH_B.s._TA_C.v.(Ct)_Ptac-synUcTE]/pCDF[wax-dgaT_AsADP1(co_Ec)-fadD_Ec]
E. coli W3110 ΔfadE pBT10_alkL/pJ294[alaDH_B.s._TA_C.v.(Ct)_Ptac-synUcTE]/pCDF[atfA1_Ab(co_Ec)-fadD_Ec]

[0259] The strains were subjected to a fed-batch fermentation in order to analyse their capacity for the production of methyl hydroxylaurate, methyl oxolaurate, methyl carboxylaurate and methyl aminolaurate from glucose. This was performed with an 8-fold parallel fermentation system from DASGIP.

[0260] For the fermentation, 1 L reactors were used, which were equipped with overhead stirrers and impeller turbines. For process monitoring, pH and pO₂ were measured online. OTR/CTR measurements were used inter alia for estimation of the metabolic selectivity and fitness of the cells.

[0261] The pH probes were calibrated by means of a two-point calibration with standard solutions of pH 4.0 and pH 7.0 according to the technical manual of DASGIP. The reactors were equipped with the necessary sensors and connections according to the technical manual and the stirrer shaft mounted. They were filled with 300 mL water and autoclaved for 20 mins at 121° C. to ensure sterility. Next, the pO2 probes were polarized overnight after connection to the measurement amplifier. Next, the water was removed under the clean bench, and replaced by high cell density medium consisting of (NH₄)₂SO4 1.76 g/L, K₂HPO₄ 19.08 g/L, KH₂PO₄ 12.5 g/L, yeast extract 6.66 g/L, trisodium citrate dihydrate 11.2 g, 17mL/L of a separately autoclaved 1% ammonium iron citrate solution, and 5 mL/L of separately autoclaved trace element stock solution (consisting of HCl (37%) 36.50 g/L, MnCl₂*4H₂O 1.91 g/L, ZnSO₄*7H₂O 1.87 g/L, ethylenediaminetetraacetic acid dihydrate 0.84 g/L, H₃BO₃ 0.30 g/L. Na₂MoO₄*2H₂O 0.25 g/L, CaCl₂*2H₂O 4.70 g/L, FeSO₄*7H₂O 17.80 g/L, CuCl₂*2H₂O 0.15 g/L) with 15 g/L glucose as carbon source (added by metering in 30 mL/L of a separately autoclaved feed solution consisting of 500 g/L glucose, 1% (w/v) MgSO₄*7H₂O and 2.2% (w/v) NH₄Cl) containing 100 mg/L ampicillin, 50 mg/L kanamycin and 100 mg/L spectinomycin.

[0262] Below, the pO2 probes were calibrated with a one-point calibration (stirrer: 600 rpm/gassing: 10 sL/hr air) and the feed-, correction agent and induction agent lines cleaned by means of Cleaning-in-Place according to the technical manual. For this, the tubes were flushed with 70% ethanol, then with 1 M NaOH, then with sterile demineralized water and finally filled with the respective media.

[0263] The strains W3110 ΔfadE pJ294[alaDH_Bs/TAcv(ct)]{Ptac}[synUcTE] pBT10_alkL pCDF[atfA_AsADP1(co_Ec)/fadD] and W3110 ΔfadE

[0264] pJ294[alaDH_Bs/TAcv(ct)]{Ptac}[synUcTE] pBT10_alkL pCDF[atfA1_Ab(co_Ec)/fadD] were firstly grown from a cryoculture in LB medium (25 mL in a 100 mL baffle flask) containing 100 mg/L ampicillin, 50 mg/L kanamycin and 100 mg/L spectinomycin overnight at 37° C. and 200 rpm for ca. 18 hrs. Next, 2 mL of this culture were transferred for a second preculture stage into 25 mL of high cell density medium consisting of (NH₄)₂SO₄ 1.76 g/L, K₂HPO₄ 19.08 g/L, KH₂PO₄ 12.5 g/L, yeast extract 6.66 g/L, trisodium citrate dihydrate 11.2 g, 17 mL/L of a separately autoclaved 1% ammonium iron citrate solution, and 5 mL/L of separately autoclaved trace element stock solution (consisting of HCl (37%) 36.50 g/L, MnCl₂*4H₂O 1.91 g/L, ZnSO₄*7H₂O 1.87 g/L, ethylenediaminetetraacetic acid dihydrate 0.84 g/L, H₃BO₃ 0.30 g/L. Na₂MoO₄*2H₂O 0.25 g/L, CaCl₂*2H₂O 4.70 g/L, FeSO₄*7H₂O 17.80 g/L, CuCl₂*2H₂O 0.15 g/L) with 15 g/L glucose as carbon source (added by metering in 30 mL/L of a separately autoclaved feed solution consisting of 500 g/L glucose, 1% (w/v) MgSO₄*7H₂O and 2.2% (w/v) NH₄Cl) containing the antibiotics already described in a 100 mL shaker flask and again incubated at 37° C./200 rpm for a further 6 hrs.

[0265] In order to inoculate the reactors with an optical density of 0.1, the OD of the second preculture stage was measured and the quantity of culture required for the inoculation calculated. The required quantity of culture was added to the thermostatted and aerated reactor through a septum by means of a 5 mL syringe.

[0266] The following standard programme was used:

| | |
|---|---|
| DO regulator | pH regulator |

| | | | |
|---|---|---|---|
| Preset | 0% | Preset | 0 mL/hr |
| P | 0.1 | P | 5 |
| Ti | 300 secs | Ti | 200 secs |
| Min | 0% | Min | 0 mL/hr |
| Max | 100% | Max | 40 mL/hr |

| N | | | XO2 (gas | | | F (gas | | |
|---|---|---|---|---|---|---|---|---|
| (Rotation) | from | to | mixture) | from | to | flow) | from | to |
| Growth | 0% | 30% | Growth | 0% | 100% | Growth | 15% | 80% |
| and | 400 rpm | 1500 rpm | and | 21% | 21% | and | 6 sL/hr | 72 sL/hr |
| biotransformation | | | biotransformation | | | biotransformation | | |

| Script | |
|---|---|
| Trigger | 31% DO (1/60 hr) |
| exactly | |
| Induction | 2 hrs after feed start |
| IPTG | |
| Feed trigger | 50% DO |
| Feed rate | 3 [mL/hr] |

[0267] The pH was regulated at pH 6.8 with 12.5% ammonia solution. During growth and biotransformation, the dissolved oxygen (pO₂ or DO) in the culture was regulated to at least 30% via stirrer revolution rate and gassing rate. After inoculation, the DO fell from 100% to this 30%, where it was maintained stable for the remainder of the fermentation.

[0268] The fermentation was performed as fed-batch, wherein as entry to the fed phase, with 5 g/Lhr glucose feed consisting of 500 g/L glucose, 1% (w/v) MgSO₄*7H₂O and 2.2% (w/v) NH₄Cl, the feed start was triggered via the DO peak indicating the end of the batch phase. At feed start, the temperature was also lowered from 37° C. to 30° C.

[0269] At this time, 24 mL of oleic acid, an oleic acid/hexadecane (1:1 (w/w)) or 2-hexyldecanoic acid/hexadecane mixture (1:1 (w/w)) were added to the reactors. 2 hrs after feed start, the expression of the genes fadD from Escherichia coli and atfA from Acinetobacter sp. ADP1 or atfA1 from Alcanivorax borkumensis SK2 was induced by the automatic addition of a prepared IPTG solution for 1 mM final concentration in the reactor. This IPTG solution also contained 3 mL methanol, which is required for the esterification of the fatty acids produced. The induction of the alkBGT genes was effected by the manual addition of 0.025% (v/v) DCPK 10 hrs after feed start.

[0270] During the culturing, samples were withdrawn and the concentration of fatty acids and ω-functionalized fatty acids quantified with the method described below.

[0271] For the sampling, 2 mL of fermentation broth were withdrawn from the vessel and a portion thereof diluted 1/10 in an acetonitrile-formic acid mixture (80% (v/v) acetonitrile in water; 0.1% (v/v) formic acid).

[0272] The quantification of methyl laurate LSME, methyl ω-hydroxylaurate HLSME, methyl ω-oxolaurate OLSME, methyl ω-aminolaurate ALSME and methyl ω-carboxylaurate DDSME, ω-aminolauric acid ALS, ω-carboxylauric acid DDS, lauric acid LS, ω-hydroxylauric acid HLS and ω-oxolauric acid OLS in the fermentation samples was effected by means of LC-ESI/MS² on the basis of an external calibration for all analytes (0.1-50 mg/L) and with use of the internal standards aminoundecanoic acid (AUD), d4-ALSME, 13C-DDSME and d3-LSME.

[0273] For this, the following instruments were used:
[0274] HPLC unit 1260 (Agilent; Böblingen) with autosampler (G1367E), binary pump (G1312B) and column oven (G1316A)
[0275] Mass spectrometer TripelQuad 6410 (Agilent; Boblingen) with ESI source
[0276] HPLC column: Kinetex C18, 100×2.1 mm, particle size: 2.6 μm, pore size 100 Å (Phenomenex; Aschaffenburg)
[0277] Precolumn: KrudKatcher Ultra HPLC in-line filter; 0.5 μm filter depth and 0.004 mm internal diameter (Phenomenex; Aschaffenburg)

[0278] The samples were prepared by pipetting 1900 μL of solvent (80% (v/v) ACN, 20% bidest. H₂O (v/v), +0.1% formic acid) and 100 μL of sample into a 2 mL reaction vessel. The mixture was vortexed for ca. 10 seconds and then centrifuged at ca. 13,000 rpm for 5 mins. The clear supernatant was withdrawn with a pipette and analysed after appropriate dilution with diluent (80% (v/v) ACN, 20% bidest. H₂O (v/v), +0.1% formic acid). 100 μL of ISTD were pipetted into each 900 μL sample (10 μL with a sample volume of 90 μL).

[0279] The HPLC separation was effected with the aforementioned column and precolumn. The injection volume was 0.7 μL, the column temperature 50° C. and the flow rate 0.6 mL/min. The mobile phase consisted of eluent A (0.1% (v/v) aqueous formic acid) and eluent B (acetonitrile with 0.1% (v/v) formic acid). The following gradient profile was used

| Time [mins] | Eluent A [%] | Eluent B [%] |
|---|---|---|
| 0 | 77 | 23 |
| 0.3 | 77 | 23 |
| 0.4 | 40 | 60 |
| 2.5 | 40 | 60 |
| 2.6 | 2 | 98 |
| 5.5 | 2 | 98 |
| 5.6 | 77 | 23 |
| 9 | 77 | 23 |

[0280] The ESI-MS² analysis was effected in positive mode with the following ESI source parameters:
[0281] Gas temperature 280° C.
[0282] Gas flow rate 11 L/min
[0283] Nebulizer pressure 50 psi
[0284] Capillary voltage 4000 V

[0285] The detection and quantification of the individual compounds was effected with the following parameters, wherein in each case one product ion was used as Qualifier and one as Quantifier.

| | Precursor Ion | Product Ion | Dwell | Collision |
|---|---|---|---|---|
| Analyte | [m/z] | [m/z] | time [ms] | energy [eV] |
| DDSME | 245.2 | 167.1 | 25 | 6 |
| DDSME | 245.2 | 149.1 | 50 | 8 |
| HLSME | 231.3 | 181.2 | 15 | 2 |
| HLSME | 231.3 | 163.2 | 25 | 5 |
| DDS | 231.2 | 213.2 | 50 | 0 |
| DDS | 231.2 | 149.1 | 25 | 9 |
| ALSME | 230.3 | 198.1 | 25 | 10 |
| ALSME | 230.3 | 163.2 | 15 | 10 |
| OLSME | 229.2 | 197.2 | 50 | 0 |
| OLSME | 229.2 | 161.1 | 25 | 5 |
| HLS | 217.2 | 181.2 | 35 | 0 |
| HLS | 217.2 | 163.1 | 20 | 4 |
| OLS | 215.2 | 161.2 | 25 | 0 |
| OLS | 215.2 | 95.2 | 60 | 13 |

[0286] It was shown that the strains E. coli W3110 ΔfadE pBT10_alkL/pJ294[alaDH_B.s._TA_C.v.(Ct)_Ptac-synUcTE]/pCDF[wax-dgaT_AsADP1(co_Ec)-fadD_Ec] and E. coli W3110 ΔfadE pBT10_alkL/pJ294[alaDH_B.s._TA_C.v.(Ct)_Ptac-synUcTE]/pCDF[atfA1_Ab(co_Ec)-fadD_Ec] with addition of 1% (v/v) methanol are capable of forming methyl laurate, methyl ω-hydroxylaurate, methyl ω-oxolaurate, methyl ω-aminolaurate and methyl ω-carboxylaurate. In addition it could be shown that under these conditions both strains also form lauric acid, ω-hydroxylauric acid, ω-oxolauric acid, ω-aminolauric acid and ω-carboxylauric acid.

[0287] Production of ω-functionalized fatty acid methyl esters. The concentrations of methyl laurate, methyl ω-carboxylaurate, methyl ω-hydroxylaurate, methyl ω-oxolaurate and methyl ω-aminolaurate after 38.33 hours fermentation time are stated.

| | | C_{methyl laurate} | C_{methyl ω-carboxylaurate} |
|---|---|---|---|
| Strain | Added organic phase | [mg/L] | [mg/L] |
| E. coli W3110 ΔfadE pBT10_alkL/ | Oleic acid | 28.4 | 1.8 |
| pJ294[alaDH_B.s._TA_C.v.(ct)_Ptac- | | | |
| synUcTE]/pCDF[wax- | | | |
| dgaT_AsADP1(co_Ec)-fadD_Ec] | | | |
| E. coli W3110 ΔfadE pBT10_alkL/ | Oleic acid | 20.2 | 0.4 |
| pJ294[alaDH_B.s._TA_C.v.(ct)_Ptac- | | | |
| synUcTE]/pCDF[atfA1_Ab(co_Ec)-fadD_Ec] | | | |
| E. coli W3110 ΔfadE pBT10_alkL/ | Oleic acid/ | 13.2 | 1.4 |
| pJ294[alaDH_B.s._TA_C.v.(ct)_Ptac- | hexadecane | | |
| synUcTE]/pCDF[wax- | | | |
| dgaT_AsADP1(co_Ec)-fadD_Ec] | | | |
| E. coli W3110 ΔfadE pBT10_alkL/ | 2-hexyl- | 7.5 | 0.9 |
| pJ294[alaDH_B.s._TA_C.v.(ct)_Ptac- | decanoic | | |
| synUcTE]/pCDF[wax- | acid/ | | |
| dgaT_AsADP1(co_Ec)-fadD_Ec] | hexadecane | | |

| | C_{methyl ω-hydroxylaurate} | C_{methyl ω-oxolaurate} | C_{methyl ω-aminolaurate} |
|---|---|---|---|
| Strain | [mg/L] | [mg/L] | [mg/L] |
| E. coli W3110 ΔfadE pBT10_alkL/ | 4.6 | 2.0 | 4.0 |
| pJ294[alaDH_B.s._TA_C.v.(ct)_Ptac- | | | |
| synUcTE]/pCDF[wax- | | | |
| dgaT_AsADP1(co_Ec)-fadD_Ec] | | | |
| E. coli W3110 ΔfadE pBT10_alkL/ | 0.8 | 1.2 | 2.2 |
| pJ294[alaDH_B.s._TA_C.v.(ct)_Ptac- | | | |
| synUcTE]/pCDF[atfA1_Ab(co_Ec)-fadD_Ec] | | | |
| E. coli W3110 ΔfadE pBT10_alkL/ | 2.1 | 1.3 | 2.6 |
| pJ294[alaDH_B.s._TA_C.v.(ct)_Ptac- | | | |
| synUcTE]/pCDF[wax- | | | |
| dgaT_AsADP1(co_Ec)-fadD_Ec] | | | |
| E. coli W3110 ΔfadE pBT10_alkL/ | 1.7 | 0.1 | 40.6 |
| pJ294[alaDH_B.s._TA_C.v.(ct)_Ptac- | | | |
| synUcTE]/pCDF[wax- | | | |
| dgaT_AsADP1(co_Ec)-fadD_Ec] | | | |

### Example 9

### Production of Methyl Aminolaurate by an E. coli Strain with Deletion of the Gene fadE and Expression Vectors for the Genes synUcTE from Umbellularia californica, Ald from Bacillus subtilis, and Cv_{—}2025 from Chromobacterium violaceum in Combination with an Expression Vector for the Genes alkB, alkG and alkT from the alk Operon of Pseudomonas putida and an Expression Vector for the Genes fadD from Escherichia coli and Wax-dgaT from Acinetobacter sp. ADP1 or atfA1 from Alcanivorax borkumensis

[0288] To create an E. coli strain with expression vectors for the genes synUcTE from Umbellularia californica, ald from Bacillus subtilis, and Cv_{—}2025 from Chromobacterium violaceum in combination with an expression vector for the genes alkB, alkG and alkT from the alk operon of Pseudomonas putida GPo1 and an expression vector for the genes fadD from Escherichia coli and wax-dgaT from Acinetobacter sp. ADP1 or atfA1 from Alcanivorax borkumensis SK2, electrocompetent cells of E. coli W3110 ΔfadE (construction described in Example 8) are produced. This takes place in a manner known to those skilled in the art. E. coli W3110 ΔfadE is sequentially transformed with the plasmids pBT10 (construction described in practical example B.2 of PCT/EP2008/067447), pJ294[alaDH_B.s._TA_C.v.(Ct)_Ptac-synUcTE] (SEQ ID No. 5) and pCDF[wax-dgaT_AsADP1(co_Ec)-fadD_Ec] (SEQ ID No. 16) and pCDF[atfA1_Ab(co_Ec)-fadD_Ec] (SEQ ID No. 17) respectively and plated out onto LB agar plates containing kanamycin (50 μg/ml), ampicillin (100 μg/ml) and spectinomycin (100 μg/ml). Transformants are checked for the presence of the correct plasmids by plasmid preparation and analytical restriction analysis. In this manner, the following strains are constructed:
[0289] E. coli W3110 ΔfadE pBT10/pJ294[alaDH_B.s._TA_C.v.(Ct)_Ptac-synUcTE]/pCDF[wax-dgaT_AsADP1(co_Ec)-fadD_Ec]
[0290] E. coli W3110 ΔfadE pBT10/pJ294[alaDH_B.s._TA_C.v.(Ct)_Ptac-synUcTE]/pCDF[atfA1_Ab(co_Ec)-fadD_Ec]

[0291] The strains are subjected to a fed-batch fermentation in order to analyse their capacity for the production of methyl hydroxylaurate, methyl oxolaurate, methyl carboxylaurate and methyl aminolaurate from glucose. This is performed with an 8-fold parallel fermentation system from DASGIP, as described in Example 8.

[0292] It is shown that the strains E. coli W3110 ΔfadE pBT10/pJ294[alaDH_B.s._TA_C.v.(Ct)_Ptac-synUcTE]/pCDF[wax-dgaT_AsADP1(co_Ec)-fadD_Ec] and E. coli W3110 ΔfadE pBT10/pJ294[alaDH_B.s._TA_C.v.(Ct)_Ptac-synUcTE]/pCDF[atfA1_Ab(co_Ec)-fadD_Ec] with addition of 1% (v/v) methanol are capable of forming lauric acid, methyl laurate, methyl ω-hydroxylaurate, methyl ω-oxolaurate, methyl ω-aminolaurate and methyl ω-carboxylaurate.

### Example 10

### Production of Methyl Aminohexanoate, Methyl Aminooctanoate, Methyl Aminodecanoate, Methyl Aminotetradecanoate and Methyl Amino-9-Hexadecenoate by E. coli Strains without Deletion of an fad Gene and with Deletion of One of the Genes fadA, fadB, fadD, fadE or fadL and Expression Vectors for the Genes synUcTE from Umbellularia californica, ChFATB2 from Cuphea hookeriana, CnFATB3 from Cocos nucifera or CPF 2954 from Clostridium perfringens and Ald from Bacillus subtilis, Cv_{—}2025 from Chromobacterium violaceum in Combination with an Expression Vector for the Genes alkB, alkG and alkT from the alk Operon of Pseudomonas putida and an Expression Vector for the Genes fadD from Escherichia coli and Wax-dgaT from Acinetobacter sp. ADP1 or atfA1 from Alcanivorax borkumensis

[0293] To create E. coli strains with expression vectors for the genes synUcTE from Umbellularia californica, ChFATB2 from Cuphea hookeriana (SEQ ID No. 58), CnFATB3 from Cocos nucifera (SEQ ID No. 60) or CPF_{—}2954 from Clostridium perfringens (SEQ ID No. 62) and ald from Bacillus subtilis, and Cv_{—}2025 from Chromobacterium violaceum in combination with an expression vector for the genes alkB, alkG and alkT from the alk operon of Pseudomonas putida GPo1 and an expression vector for the gene fadD from Escherichia coli and wax-dgaT from Acinetobacter sp. ADP1 or atfA1 from Alcanivorax borkumensis SK2, electrocompetent cells of E. coli BW25113, JW5578-1 Kan^{S}, JW3822-1 Kan^{S}, JW1794-1 Kan^{S}, JW5020-1 Kan^{S} and JW2341-1 Kan^{S} are produced. This takes place in a manner known to those skilled in the art.

[0294] E. coli JW5578-1 Kan^{S}, JW3822-1 Kan^{S}, JW1794-1 Kan^{S}, JW5020-1 Kan^{S} and JW2341-1 Kan^{S} are derivatives of E. coli E. coli JW5578-1, JW3822-1, JW1794-1, JW5020-1 and JW2341-1 (CGSC, The coli genetic stock center, Yale University, New Haven, USA), and these in turn are E. coli BW25113 derivatives which carry a deletion of the genes fadA (SEQ ID No. 64; coding for enzyme E_{f}), fadB (SEQ ID No. 66; coding for enzyme E_{d} and an enzyme Eₑ), fadD (SEQ ID No. 21; coding for enzyme Eₐ), fadE (SEQ ID No. 40; coding for enzyme E_{b}) and fadL (SEQ ID No. 68; coding for an enzyme which catalyses the transport of fatty acid methyl esters across the outer membrane). The genes fadA, fadB, fadD, fadE and fadL are replaced by a kanamycin cassette. Before the provision of the strain with the expression vectors by means of a helper plasmid, which codes for the Flp recombinase, this is removed in a manner known to those skilled in the art (see Datsenko K. A. and Wanner B. L. (2000) PNAS 97(12):6640-6645), resulting in strains JW5578-1 Kan^{S}, JW3822-1 Kan^{S}, JW1794-1 Kan^{S}, JW5020-1 Kan^{S} and JW2341-1 Kan^{S}.

[0295] BW25113, JW5578-1 Kan^{S}, JW3822-1 Kan^{S}, JW1794-1 Kan^{S}, JW5020-1 Kan^{S} and JW2341-1 Kan^{S} are sequentially transformed with the plasmids
[0296] 1. pBT10 (construction described in practical example B.2 of PCT/EP2008/067447), and
[0297] 2. pJ294[alaDH_B.s._TA_C.v.(Ct)_Ptac-synUcTE] (SEQ ID No. 38), pJ294[alaDH_B.s._TA_C.v.(Ct)_Ptac-ChFATB2] (SEQ ID No. 70), pJ294[alaDH_B.s._TA_C.v.(Ct)_Ptac-CnFATB3] (SEQ ID No. 71), or pJ294[alaDH_B.s._TA_C.v.(Ct)_Ptac-CPF_{—}2954] (SEQ ID No. 72), and
[0298] 3. pCDF[wax-dgaT_AsADP1(co_Ec)-fadD_Ec] (SEQ ID No. 16) or pCDF[atfA1_Ab(co_Ec)-fadD_Ec] (SEQ ID No. 17)
   and plated out onto LB agar plates containing kanamycin (50 μg/ml), ampicillin (100 μg/ml) and spectinomycin (100 μg/ml). Transformants are checked for the presence of the correct plasmids by plasmid preparation and analytical restriction analysis.

[0299] The plasmids pJ294[alaDH_B.s._TA_C.v.(Ct)_Ptac-ChFATB2] (SEQ ID No. 38), pJ294[alaDH_B.s._TA_C.v.(Ct)_Ptac-CnFATB3] (SEQ ID No. 70) and pJ294[alaDH_B.s._TA_C.v.(Ct)_Ptac-CPF_{—}2954] (SEQ ID No. 71) are created starting from the plasmid pJ294[alaDH_B.s._TA_C.v.(Ct)_Ptac-synUcTE] (SEQ ID No. 72), in that the gene coding for the thioesterase synUcTE together with P_{tac} and a 3′ flanking region is cut out from the vector via BamHI/NotI and replaced by the genes coding for the thioesterases ChFATB2 (SEQ ID No. 59) CnFATB3 (SEQ ID No. 61) or CPF_{—}2954 (SEQ ID No. 63) (incl. P_{tac} and identical 3′ flanking region). These fragments are created by gene synthesis, wherein the regions coding for ChFATB2 and CnFATB3 are codon-optimized for translation in E. coli, but the region coding for CPF_{—}2954 is not codon-optimized, but instead the wild type sequence is used.

[0300] In this manner, inter alia the following strains are constructed:
[0301] E. coli BW25113 pBT10/pJ294[alaDH_B.s._TA_C.v.(Ct)_Ptac-synUcTE]/pCDF[wax-dgaT_AsADP1(co_Ec)-fadD_Ec]
[0302] E. coli BW25113 pBT10/pJ294[alaDH_B.s._TA_C.v.(Ct)_Ptac-synUcTE]/pCDF[atfA1_Ab(co_Ec)-fadD_Ec]
[0303] E. coli JW5578-1 Kan^{S} pBT10/pJ294[alaDH_B.s._TA_C.v.(Ct)_Ptac-synUcTE]/pCDF[wax-dgaT_AsADP1(co_Ec)-fadD_Ec]
[0304] E. coli JW5578-1 Kan^{S} pBT10/pJ294[alaDH_B.s._TA_C.v.(Ct)_Ptac-synUcTE]/pCDF[atfA1_Ab(co_Ec)-fadD_Ec]
[0305] E. coli JW3822-1 Kan^{S} pBT10/pJ294[alaDH_B.s._TA_C.v.(Ct)_Ptac-synUcTE]/pCDF[wax-dgaT_AsADP1(co_Ec)-fadD_Ec]
[0306] E. coli JW3822-1 Kan^{S} pBT10/pJ294[alaDH_B.s._TA_C.v.(Ct)_Ptac-synUcTE]/pCDF[atfA1_Ab(co_Ec)-fadD_Ec]
[0307] E. coli JW1794-1 Kan^{S} pBT10/pJ294[alaDH_B.s._TA_C.v.(Ct)_Ptac-synUcTE]/pCDF[wax-dgaT_AsADP1(co_Ec)-fadD_Ec]
[0308] E. coli JW1794-1 Kan^{S} pBT10/pJ294[alaDH_B.s._TA_C.v.(Ct)_Ptac-synUcTE]/pCDF[atfA1_Ab(co_Ec)-fadD_Ec]
[0309] E. coli JW5020-1 Kan^{S} pBT10/pJ294[alaDH_B.s._TA_C.v.(Ct)_Ptac-synUcTE]/pCDF[wax-dgaT_AsADP1(co_Ec)-fadD_Ec]
[0310] E. coli JW5020-1 Kan^{S} pBT10/pJ294[alaDH_B.s._TA_C.v.(Ct)_Ptac-synUcTE]/pCDF[atfA1_Ab(co_Ec)-fadD_Ec]
[0311] E. coli JW2341-1 Kan^{S} pBT10/pJ294[alaDH_B.s._TA_C.v.(Ct)_Ptac-synUcTE]/pCDF[wax-dgaT_AsADP1(co_Ec)-fadD_Ec]
[0312] E. coli JW2341-1 Kan^{S} pBT10/pJ294[alaDH_B.s._TA_C.v.(Ct)_Ptac-synUcTE]/pCDF[atfA1_Ab(co_Ec)-fadD_Ec]

[0313] These strains are subjected to a fed-batch fermentation in order to analyse their capacity for production of methyl hydroxylaurate, methyl oxolaurate, methyl carboxylaurate and methyl aminolaurate and methyl hydroxytetradecanoate, methyl oxotetradecanoate, methyl carboxytetradecanoate and methyl aminotetradecanoate from glucose. This is performed with an 8-fold parallel fermentation system from DASGIP, as described in Example 8.

[0314] It is shown that these strains, with addition of 1% (v/v) methanol, are capable of forming methyl laurate, methyl hydroxylaurate, methyl oxolaurate, methyl carboxylaurate and methyl aminolaurate and methyl tetradecanoate, methyl hydroxytetradecanoate, methyl oxotetradecanoate, methyl carboxytetradecanoate and methyl aminotetradecanoate from glucose.

[0315] Further, the following strains are constructed:
[0316] E. coli BW25113 pBT10/pJ294[alaDH_B.s._TA_C.v.(Ct)_Ptac-ChFATB2]/pCDF[wax-dgaT_AsADP1(co_Ec)-fadD_Ec]
[0317] E. coli BW25113 pBT10/pJ294[alaDH_B.s._TA_C.v.(Ct)_Ptac-ChFATB2]/pCDF[atfA1_Ab(co_Ec)-fadD_Ec]
[0318] E. coli JW5578-1 Kan^{S} pBT10/pJ294[alaDH_B.s._TA_C.v.(Ct)_Ptac-ChFATB2]/pCDF[wax-dgaT_AsADP1(co_Ec)-fadD_Ec]
[0319] E. coli JW5578-1 Kan^{S} pBT10/pJ294[alaDH_B.s._TA_C.v.(Ct)_Ptac-ChFATB2]/pCDF[atfA1_Ab(co_Ec)-fadD_Ec]
[0320] E. coli JW3822-1 Kan^{S} pBT10/pJ294[alaDH_B.s._TA_C.v.(Ct)_Ptac-ChFATB2]/pCDF[wax-dgaT_AsADP1(co_Ec)-fadD_Ec]
[0321] E. coli JW3822-1 Kan^{S} pBT10/pJ294[alaDH_B.s._TA_C.v.(Ct)_Ptac-ChFATB2]/pCDF[atfA1_Ab(co_Ec)-fadD_Ec]
[0322] E. coli JW1794-1 Kan^{S} pBT10/pJ294[alaDH_B.s._TA_C.v.(Ct)_Ptac-ChFATB2]/pCDF[wax-dgaT_AsADP1(co_Ec)-fadD_Ec]
[0323] E. coli JW1794-1 Kan^{S} pBT10/pJ294[alaDH_B.s._TA_C.v.(Ct)_Ptac-ChFATB2]/pCDF[atfA1_Ab(co_Ec)-fadD_Ec]
[0324] E. coli JW5020-1 Kan^{S} pBT10/pJ294[alaDH_B.s._TA_C.v.(Ct)_Ptac-ChFATB2]/pCDF[wax-dgaT_AsADP1(co_Ec)-fadD_Ec]
[0325] E. coli JW5020-1 Kan^{S} pBT10/pJ294[alaDH_B.s._TA_C.v.(Ct)_Ptac-ChFATB2]/pCDF[atfA1_Ab(co_Ec)-fadD_Ec]
[0326] E. coli JW2341-1 Kan^{S} pBT10/pJ294[alaDH_B.s._TA_C.v.(Ct)_Ptac-ChFATB2]/pCDF[wax-dgaT_AsADP1(co_Ec)-fadD_Ec]
[0327] E. coli JW2341-1 Kan^{S} pBT10/pJ294[alaDH_B.s._TA_C.v.(Ct)_Ptac-ChFATB2]/pCDF[atfA1_Ab(co_Ec)-fadD_Ec]

[0328] These strains are subjected to a fed-batch fermentation in order to analyse their capacity for production of methyl hydroxyoctanoate, methyl oxooctanoate, methyl carboxyoctanoate and methyl aminooctanoate and methyl hydroxydecanoate, methyl oxodecanoate, methyl carboxydecanoate and methyl aminodecanoate from glucose. This is performed with an 8-fold parallel fermentation system from DASGIP, as described in Example 8.

[0329] It is shown that these strains, with addition of 1% (v/v) methanol, are capable of forming methyl octanoate, methyl hydroxyoctanoate, methyl oxooctanoate, methyl carboxyoctanoate and methyl aminooctanoate and methyl decanoate, methyl hydroxydecanoate, methyl oxodecanoate, methyl carboxydecanoate and methyl aminodecanoate from glucose.

[0330] Further, the following strains are constructed:
[0331] E. coli BW25113 pBT10/pJ294[alaDH_B.s._TA_C.v.(Ct)_Ptac-CnFATB3]/pCDF[wax-dgaT_AsADP1(co_Ec)-fadD_Ec]
[0332] E. coli BW25113 pBT10/pJ294[alaDH_B.s._TA_C.v.(Ct)_Ptac-CnFATB3]/pCDF[atfA1_Ab(co_Ec)-fadD_Ec]
[0333] E. coli JW5578-1 Kan^{S} pBT10/pJ294[alaDH_B.s._TA_C.v.(Ct)_Ptac-CnFATB3]/pCDF[wax-dgaT_AsADP1(co_Ec)-fadD_Ec]
[0334] E. coli JW5578-1 Kan^{S} pBT10/pJ294[alaDH_B.s._TA_C.v.(Ct)_Ptac-CnFATB3]/pCDF[atfA1_Ab(co_Ec)-fadD_Ec]
[0335] E. coli JW3822-1 Kan^{S} pBT10/pJ294[alaDH_B.s._TA_C.v.(Ct)_Ptac-CnFATB3]/pCDF[wax-dgaT_AsADP1(co_Ec)-fadD_Ec]
[0336] E. coli JW3822-1 Kan^{S} pBT10/pJ294[alaDH_B.s._TA_C.v.(Ct)_Ptac-CnFATB3]/pCDF[atfA1_Ab(co_Ec)-fadD_Ec]
[0337] E. coli JW1794-1 Kan^{S} pBT10/pJ294[alaDH_B.s._TA_C.v.(Ct)_Ptac-CnFATB3]/pCDF[wax-dgaT_AsADP1(co_Ec)-fadD_Ec]
[0338] E. coli JW1794-1 Kan^{S} pBT10/pJ294[alaDH_B.s._TA_C.v.(Ct)_Ptac-CnFATB3]/pCDF[atfA1_Ab(co_Ec)-fadD_Ec]
[0339] E. coli JW5020-1 Kan^{S} pBT10/pJ294[alaDH_B.s._TA_C.v.(Ct)_Ptac-CnFATB3]/pCDF[wax-dgaT_AsADP1(co_Ec)-fadD_Ec]
[0340] E. coli JW5020-1 Kan^{S} pBT10/pJ294[alaDH_B.s._TA_C.v.(Ct)_Ptac-CnFATB3]/pCDF[atfA1_Ab(co_Ec)-fadD_Ec]
[0341] E. coli JW2341-1 Kan^{S} pBT10/pJ294[alaDH_B.s._TA_C.v.(Ct)_Ptac-CnFATB3]/pCDF[wax-dgaT_AsADP1(co_Ec)-fadD_Ec]
[0342] E. coli JW2341-1 Kan^{S} pBT10/pJ294[alaDH_B.s._TA_C.v.(Ct)_Ptac-CnFATB3]/pCDF[atfA1_Ab(co_Ec)-fadD_Ec]

[0343] These strains are subjected to a fed-batch fermentation in order to analyse their capacity for production of methyl hydroxylaurate, methyl oxolaurate, methyl carboxylaurate and methyl aminolaurate and methyl hydroxytetradecanoate, methyl oxotetradecanoate, methyl carboxytetradecanoate and methyl aminotetradecanoate and methyl hydroxy-9-hexadecenoate, methyl oxo-9-hexadecenoate, methyl carboxy-9-hexadecenoate and methyl amino-9-hexadecenoate from glucose. This is performed with an 8-fold parallel fermentation system from DASGIP, as described in Example 8.

[0344] It is shown that these strains, with addition of 1% (v/v) methanol, are capable of forming methyl laurate, methyl hydroxylaurate, methyl oxolaurate, methyl carboxylaurate and methyl aminolaurate and methyl tetradecanoate, methyl hydroxytetradecanoate, methyl oxotetradecanoate, methyl carboxytetradecanoate and methyl aminotetradecanoate and methyl 9-hexadecenoate, methyl hydroxy-9-hexadecenoate, methyl oxo-9-hexadecenoate, methyl carboxy-9-hexadecenoate and methyl amino-9-hexadecenoate from glucose.

[0345] Finally, the following strains are constructed:
[0346] E. coli BW25113 pBT10/pJ294[alaDH_B.s._TA_C.v.(Ct)_Ptac-CPF_{—}2954]/pCDF[wax-dgaT_AsADP1(co_Ec)-fadD_Ec]
[0347] E. coli BW25113 pBT10/pJ294[alaDH_B.s._TA_C.v.(Ct)_Ptac-CPF_{—}2954]/pCDF[atfA1_Ab(co_Ec)-fadD_Ec]
[0348] E. coli JW5578-1 Kan^{S} pBT10/pJ294[alaDH_B.s._TA_C.v.(Ct)_Ptac-CPF_{—}2954]/pCDF[wax-dgaT_AsADP1(co_Ec)-fadD_Ec]
[0349] E. coli JW5578-1 Kan^{S} pBT10/pJ294[alaDH_B.s._TA_C.v.(Ct)_Ptac-CPF_{—}2954]/pCDF[atfA1_Ab(co_Ec)-fadD_Ec]
[0350] E. coli JW3822-1 Kan^{S} pBT10/pJ294[alaDH_B.s._TA_C.v.(Ct)_Ptac-CPF_{—}2954]/pCDF[wax-dgaT_AsADP1(co_Ec)-fadD_Ec]
[0351] E. coli JW3822-1 Kan^{S} pBT10/pJ294[alaDH_B.s._TA_C.v.(Ct)_Ptac-CPF_{—}2954]/pCDF[atfA1_Ab(co_Ec)-fadD_Ec]
[0352] E. coli JW1794-1 Kan^{S} pBT10/pJ294[alaDH_B.s._TA_C.v.(Ct)_Ptac-CPF_{—}2954]/pCDF[wax-dgaT_AsADP1(co_Ec)-fadD_Ec]
[0353] E. coli JW1794-1 Kan^{S} pBT10/pJ294[alaDH_B.s._TA_C.v.(Ct)_Ptac-CPF_{—}2954]/pCDF[atfA1_Ab(co_Ec)-fadD_Ec]
[0354] E. coli JW5020-1 Kan^{S} pBT10/pJ294[alaDH_B.s._TA_C.v.(Ct)_Ptac-CPF_{—}2954]/pCDF[wax-dgaT_AsADP1(co_Ec)-fadD_Ec]
[0355] E. coli JW5020-1 Kan^{S} pBT10/pJ294[alaDH_B.s._TA_C.v.(Ct)_Ptac-CPF_{—}2954]/pCDF[atfA1_Ab(co_Ec)-fadD_Ec]
[0356] E. coli JW2341-1 Kan^{S} pBT10/pJ294[alaDH_B.s._TA_C.v.(Ct)_Ptac-CPF_{—}2954]/pCDF[wax-dgaT_AsADP1(co_Ec)-fadD_Ec]
[0357] E. coli JW2341-1 Kan^{S} pBT10/pJ294[alaDH_B.s._TA_C.v.(Ct)_Ptac-CPF_{—}2954]/pCDF[atfA1_Ab(co_Ec)-fadD_Ec]

[0358] These strains are subjected to a fed-batch fermentation in order to analyse their capacity for production of methyl hydroxyoctanoate, methyl oxooctanoate, methyl carboxyoctanoate and methyl aminooctanoate and methyl hydroxyhexanoate, methyl oxohexanoate, methyl carboxyhexanoate and methyl aminohexanoate from glucose. This is performed with an 8-fold parallel fermentation system from DASGIP, as described in Example 8.

[0359] It is shown that these strains, with addition of 1% (v/v) methanol, are capable of forming methyl octanoate, methyl hydroxyoctanoate, methyl oxooctanoate, methyl carboxyoctanoate and methyl aminooctanoate and methyl hexanoate, methyl hydroxyhexanoate, methyl oxohexanoate, methyl carboxyhexanoate and methyl aminohexanoate from glucose.

### Example 11

### Production of Aminohexanoic Acid, Aminooctanoic Acid, Aminodecanoic Acid, Aminotetradecanoic Acid and Amino-9-Hexadecenoic Acid by E. coli Strains with Deletion of One of the Genes fadA, fadB, fadD, fadE or fadL and Expression Vectors for the Genes synUcTE from Umbellularia californica, ChFATB2 from Cuphea hookeriana, CnFATB3 from Cocos nucifera or CPF 2954 from Clostridium perfringens (Genbank Acc. # ABG82470 SEQ-ID XY) and Ald from Bacillus subtilis, Cv_{—}2025 from Chromobacterium violaceum in Combination with an Expression Vector for the Genes alkB, alkG and alkT from the Alk Operon of Pseudomonas putida

[0360] To create E. coli strains with expression vectors for the genes synUcTE from Umbellularia californica, ChFATB2 from Cuphea hookeriana (SEQ ID No. 58), CnFATB3 from Cocos nucifera (SEQ ID No. 60) or CPF_{—}2954 from Clostridium perfringens (SEQ ID No. 62) and ald from Bacillus subtilis, and Cv_{—}2025 from Chromobacterium violaceum in combination with an expression vector for the genes alkB, alkG and alkT from the alk operon of Pseudomonas putida GPo1, electrocompetent cells of E. coli JW5578-1 Kan^{S}, JW3822-1 Kan^{S}, JW1794-1 Kan^{S}, JW5020-1 Kan^{S} and JW2341-1 Kan^{S} are produced. This takes place in a manner known to those skilled in the art.

[0361] JW5578-1 Kan^{S}, JW3822-1 Kan^{S}, JW1794-1 Kan^{S}, JW5020-1 Kan^{S} and JW2341-1 Kan^{S} are sequentially transformed with the plasmids
[0362] 1. pBT10 (construction described in practical example B.2 of PCT/EP2008/067447), and
[0363] 2. pJ294[alaDH_B.s._TA_C.v.(Ct)_Ptac-synUcTE] (SEQ ID No. 38), pJ294[alaDH_B.s._TA_C.v.(Ct)_Ptac-ChFATB2] (SEQ ID No. 70), pJ294[alaDH_B.s._TA_C.v.(Ct)_Ptac-CnFATB3] (SEQ ID No. 71), or pJ294[alaDH_B.s._TA_C.v.(Ct)_Ptac-CPF_{—}2954] (SEQ ID No. 72)
   and plated out onto LB agar plates containing kanamycin (50 μg/ml) and ampicillin (100 μg/ml). Transformants are checked for the presence of the correct plasmids by plasmid preparation and analytical restriction analysis.

[0364] In this manner, inter alia the following strains are constructed:
[0365] E. coli BW25113 pBT10/pJ294[alaDH_B.s._TA_C.v.(Ct)_Ptac-synUcTE]
[0366] E. coli JW5578-1 Kan^{S} pBT10/pJ294[alaDH_B.s._TA_C.v.(Ct)_Ptac-synUcTE]
[0367] E. coli JW3822-1 Kan^{S} pBT10/pJ294[alaDH_B.s._TA_C.v.(Ct)_Ptac-synUcTE]
[0368] E. coli JW1794-1 Kan^{S} pBT10/pJ294[alaDH_B.s._TA_C.v.(Ct)_Ptac-synUcTE]
[0369] E. coli JW5020-1 Kan^{S} pBT10/pJ294[alaDH_B.s._TA_C.v.(Ct)_Ptac-synUcTE]
[0370] E. coli JW2341-1 Kan^{S} pBT10/pJ294[alaDH_B.s._TA_C.v.(Ct)_Ptac-synUcTE]

[0371] These strains are subjected to a fed-batch fermentation in order to analyse their capacity for production of hydroxylauric acid, oxolauric acid, carboxylauric acid and aminolauric acid and hydroxytetradecanoic acid, oxotetradecanoic acid, carboxytetradecanoic acid and aminotetradecanoic acid from glucose. This is performed with an 8-fold parallel fermentation system from DASGIP, as described in Example 8.

[0372] It is shown that these strains are capable of forming lauric acid, hydroxylauric acid, oxolauric acid, carboxylauric acid and aminolauric acid and tetradecanoic acid, hydroxytetradecanoic acid, oxotetradecanoic acid, carboxytetradecanoic acid and aminotetradecanoic acid from glucose.

[0373] Further, the following strains are constructed:
[0374] E. coli BW25113 pBT10/pJ294[alaDH_B.s._TA_C.v.(Ct)_Ptac-ChFATB2]
[0375] E. coli JW5578-1 Kan^{S} pBT10/pJ294[alaDH_B.s._TA_C.v.(Ct)_Ptac-ChFATB2]
[0376] E. coli JW3822-1 Kan^{S} pBT10/pJ294[alaDH_B.s._TA_C.v.(Ct)_Ptac-ChFATB2]
[0377] E. coli JW1794-1 Kan^{S} pBT10/pJ294[alaDH_B.s._TA_C.v.(Ct)_Ptac-ChFATB2]
[0378] E. coli JW5020-1 Kan^{S} pBT10/pJ294[alaDH_B.s._TA_C.v.(Ct)_Ptac-ChFATB2]/
[0379] E. coli JW2341-1 Kan^{S} pBT10/pJ294[alaDH_B.s._TA_C.v.(Ct)_Ptac-ChFATB2]

[0380] These strains are subjected to a fed-batch fermentation in order to analyse their capacity for production of hydroxyoctanoic acid, oxooctanoic acid, carboxyoctanoic acid and aminooctanoic acid and hydroxydecanoic acid, oxodecanoic acid, carboxydecanoic acid and aminodecanoic acid from glucose. This is performed with an 8-fold parallel fermentation system from DASGIP, as described in Example 8.

[0381] It is shown that these strains are capable of forming octanoic acid, hydroxyoctanoic acid, oxooctanoic acid, carboxyoctanoic acid and aminooctanoic acid and decanoic acid, hydroxydecanoic acid, oxodecanoic acid, carboxydecanoic acid and aminodecanoic acid from glucose.

[0382] Further, the following strains are constructed:
[0383] E. coli BW25113 pBT10/pJ294[alaDH_B.s._TA_C.v.(Ct)_Ptac-CnFATB3]
[0384] E. coli JW5578-1 Kan^{S} pBT10/pJ294[alaDH_B.s._TA_C.v.(Ct)_Ptac-CnFATB3]
[0385] E. coli JW3822-1 Kan^{S} pBT10/pJ294[alaDH_B.s._TA_C.v.(Ct)_Ptac-CnFATB3]
[0386] E. coli JW1794-1 Kan^{S} pBT10/pJ294[alaDH_B.s._TA_C.v.(Ct)_Ptac-CnFATB3]
[0387] E. coli JW5020-1 Kan^{S} pBT10/pJ294[alaDH_B.s._TA_C.v.(Ct)_Ptac-CnFATB3]
[0388] E. coli JW2341-1 Kan^{S} pBT10/pJ294[alaDH_B.s._TA_C.v.(Ct)_Ptac-CnFATB3]

[0389] These strains are subjected to a fed-batch fermentation in order to analyse their capacity for production of hydroxylauric acid, oxolauric acid, carboxylauric acid and aminolauric acid and hydroxytetradecanoic acid, oxotetradecanoic acid, carboxytetradecanoic acid and aminotetradecanoic acid and hydroxy-9-hexadecenoic acid, oxo-9-hexadecenoic acid, carboxy-9-hexadecenoic acid and amino-9-hexadecenoic acid from glucose. This is performed with an 8-fold parallel fermentation system from DASGIP, as described in Example 8.

[0390] It is shown that these strains are capable of forming lauric acid, hydroxylauric acid, oxolauric acid, carboxylauric acid and aminolauric acid and tetradecanoic acid, hydroxytetradecanoic acid, oxotetradecanoic acid, carboxytetradecanoic acid and aminotetradecanoic acid and 9-hexadecenoic acid, hydroxy-9-hexadecenoic acid, oxo-9-hexadecenoic acid, carboxy-9-hexadecenoic acid and amino-9-hexadecenoic acid from glucose.

[0391] Finally, the following strains are constructed:
[0392] E. coli BW25113 pBT10/pJ294[alaDH_B.s._TA_C.v.(Ct)_Ptac-CPF_{—}2954]
[0393] E. coli JW5578-1 Kan^{S} pBT10/pJ294[alaDH_B.s._TA_C.v.(Ct)_Ptac-CPF_{—}2954]
[0394] E. coli JW3822-1 Kan^{S} pBT10/pJ294[alaDH_B.s._TA_C.v.(Ct)_Ptac-CPF_{—}2954]
[0395] E. coli JW1794-1 Kan^{S} pBT10/pJ294[alaDH_B.s._TA_C.v.(Ct)_Ptac-CPF_{—}2954]
[0396] E. coli JW5020-1 Kan^{S} pBT10/pJ294[alaDH_B.s._TA_C.v.(Ct)_Ptac-CPF_{—}2954]
[0397] E. coli JW2341-1 Kan^{S} pBT10/pJ294[alaDH_B.s._TA_C.v.(Ct)_Ptac-CPF_{—}2954]

[0398] These strains are subjected to a fed-batch fermentation in order to analyse their capacity for production of hydroxyoctanoic acid, oxooctanoic acid, carboxyoctanoic acid and aminooctanoic acid and hydroxyhexanoic acid, oxohexanoic acid, carboxyhexanoic acid and aminohexanoic acid from glucose. This is performed with an 8-fold parallel fermentation system from DASGIP, as described in Example 8.

[0399] It is shown that these strains are capable of forming octanoic acid, hydroxyoctanoic acid, oxooctanoic acid, carboxyoctanoic acid and aminooctanoic acid and hexanoic acid, hydroxyhexanoic acid, oxohexanoic acid, carboxyhexanoic acid and aminohexanoic acid from glucose.

### Example 12

### Production of Methyl Aminolaurate by an E. coli Strain with Deletion in the Gene fadE and Expression Vectors for the Genes synUcTE from Umbellularia Californica, Ald from Bacillus subtilis, Psyr_{—}4866 from Pseudomonas syringae pv. syringae B728a, PFL_{—}5927 from Pseudomonas protegens Pf-5, PSPPH 4896 from Pseudomonas syringae pv. phaseolicola 1448A or PSPTOT1_{—}2473 from Pseudomonas syringae pv. tomato T1 in Combination with an Expression Vector for the Genes alkB, alkG, alkT and alkL from the Alk Operon of Pseudomonas putida and an Expression Vector for the Genes fadD from Escherichia coli and Wax-dgaT from Acinetobacter sp. ADP1 or atfA1 from Alcanivorax borkumensis

[0400] To create E. coli strains with expression vectors for the genes synUcTE from Umbellularia californica, ald from Bacillus subtilis, Psyr_{—}4866 from Pseudomonas syringae pv. syringae B728a (SEQ ID No. 73), PFL_{—}5927 from Pseudomonas protegens Pf-5 (SEQ ID No. 75), PSPPH_{—}4896 from Pseudomonas syringae pv. phaseolicola 1448A (SEQ ID No. 77) or PSPTOT1_{—}2473 from Pseudomonas syringae pv. tomato T1 (SEQ ID No. 79) in combination with an expression vector for the genes alkB, alkG and alkT from the alk operon of Pseudomonas putida GPo1 and an expression vector for the genes fadD from Escherichia coli and wax-dgaT from Acinetobacter sp. ADP1 or atfA1 from Alcanivorax borkumensis, electrocompetent cells of E. coli JW5020-1 Kan^{S} are produced. This takes place in a manner known to those skilled in the art.

[0401] JW5020-1 Kan^{S} is sequentially transformed with the plasmids
[0402] 1. pBT10 (construction described in practical example B.2 of PCT/EP2008/067447), and
[0403] 2. pJ294[alaDH_B.s._TA_Psyr_{—}4866_Ptac-synUcTE] (SEQ ID No. 81), pJ294[alaDH_B.s._TA_PFL_{—}5927_Ptac-synUcTE] (SEQ ID No. 82), pJ294[alaDH_B.s._TA_PSPPH_{—}4896_Ptac-synUcTE] (SEQ ID No. 83), or pJ294[alaDH_B.s._TA_PSPTOT1_{—}2473_Ptac-synUcTE] (SEQ ID No. 84), and
[0404] 3. pCDF[wax-dgaT_AsADP1(co_Ec)-fadD_Ec] (SEQ ID No. 16) or pCDF[affA1_Ab(co_Ec)-fadD_Ec] (SEQ ID No. 17)
   and plated out onto LB agar plates containing kanamycin (50 μg/ml), ampicillin (100 μg/ml) and spectinomycin (100 μg/ml). Transformants are checked for the presence of the correct plasmids by plasmid preparation and analytical restriction analysis.

[0405] The plasmids pJ294[alaDH_B.s._Psyr_{—}4866_Ptac-synUcTE] (SEQ ID No. 81), pJ294[alaDH_B.s._TA_PFL_{—}5927_Ptac-synUcTE] (SEQ ID No. 82), pJ294[alaDH_B.s._TA_PSPPH_{—}4896_Ptac-synUcTE] (SEQ ID No. 83) and pJ294[alaDH_B.s._TA_PSPTOT1_{—}2473_Ptac-synUcTE] (SEQ ID No. 84) are created starting from the plasmid pJ294[alaDH_B.s._TA_C.v.(Ct)_Ptac-synUcTE] (SEQ ID No. 38), in that the gene coding for the transaminase Cv_{—}2025 with the 3′ end of the ald gene from Bacillus subtilis and a 3′ flanking region is cut out from the vector via BglII FseI and replaced by the genes coding for the transaminases Psyr_{—}4866 (SEQ ID No. 74), PFL_{—}5927 (SEQ ID No. 76), PSPPH_{—}4896 (SEQ ID No. 78) or PSPTOT1_{—}2473 (SEQ ID No. 80) (incl. the 3′ end of the ald gene from Bacillus subtilis and identical 3′ flanking region). These fragments are created by gene synthesis, wherein the regions coding for Psyr_{—}4866, PFL_{—}5927, PSPPH_{—}4896 and PSPTOT1_{—}2473 are codon-optimized for translation in E. coli.

[0406] In this manner, the following strains are constructed:
[0407] E. coli JW5020-1 Kan^{S} pBT10/pJ294[alaDH_B.s._Psyr_{—}4866_Ptac-synUcTE]/pCDF[wax-dgaT_AsADP1(co_Ec)-fadD_Ec]
[0408] E. coli JW5020-1 Kan^{S} pBT10/pJ294[alaDH_B.s._Psyr_{—}4866_Ptac-synUcTE]/pCDF[atfA1_Ab(co_Ec)-fadD_Ec]
[0409] E. coli JW5020-1 Kan^{S} pBT10/pJ294[alaDH_B.s._TA_PFL_{—}5927_Ptac-synUcTE]/pCDF[wax-dgaT_AsADP1(co_Ec)-fadD_Ec]
[0410] E. coli JW5020-1 Kan^{S} pBT10/pJ294[alaDH_B.s._TA_PFL_{—}5927_Ptac-synUcTE]/pCDF[atfA1_Ab(co_Ec)-fadD_Ec]
[0411] E. coli JW5020-1 Kan^{S} pBT10/pJ294[alaDH_B.s._TA_PSPPH_{—}4896_Ptac-synUcTE]/pCDF[wax-dgaT_AsADP1(co_Ec)-fadD_Ec]
[0412] E. coli JW5020-1 Kan^{S} pBT10/pJ294[alaDH_B.s._TA_PSPPH_{—}4896_Ptac-synUcTE]/pCDF[atfA1_Ab(co_Ec)-fadD_Ec]
[0413] E. coli JW5020-1 Kan^{S} pBT10/pJ294[alaDH_B.s._TA_PSPTOT1_{—}2473_Ptac-synUcTE]/pCDF[wax-dgaT_AsADP1(co_Ec)-fadD_Ec]
[0414] E. coli JW5020-1 Kan^{S} pBT10/pJ294[alaDH_B.s._TA_PSPTOT1_{—}2473_Ptac-synUcTE]/pCDF[atfA1_Ab(co_Ec)-fadD_Ec]

[0415] These strains are subjected to a fed-batch fermentation in order to analyse their capacity for production of methyl hydroxylaurate, methyl oxolaurate, methyl carboxylaurate and methyl aminolaurate and methyl hydroxytetradecanoate, methyl oxotetradecanoate, methyl carboxytetradecanoate and methyl aminotetradecanoate from glucose. This is performed with an 8-fold parallel fermentation system from DASGIP, as described in Example 8.

[0416] It is shown that these strains, with addition of 1% (v/v) methanol, are capable of forming methyl laurate, methyl hydroxylaurate, methyl oxolaurate, methyl carboxylaurate and methyl aminolaurate and methyl tetradecanoate, methyl hydroxytetradecanoate, methyl oxotetradecanoate, methyl carboxytetradecanoate and methyl aminotetradecanoate from glucose.

### Example 13

### Production of aminolauric acid by an E. coli strain with deletion in the gene fadE and expression vectors for the genes synUcTE from Umbellularia californica, ald from Bacillus subtilis, Psyr_{—}4866 from Pseudomonas syringae pv. syringae 8728a, PFL_{—}5927 from Pseudomonas protegens Pf-5, PSPPH 4896 from Pseudomonas syringae pv. phaseolicola 1448A or PSPTOT1_{—}2473 from Pseudomonas syringae pv. tomato T1 in Combination with an Expression Vector for the Genes alkB, alkG, alkT and alkL from the Alk Operon of Pseudomonas putida

[0417] To create E. coli strains with expression vectors for the genes synUcTE from Umbellularia californica, ald from Bacillus subtilis, Psyr_{—}4866 from Pseudomonas syringae pv. syringae B728a (SEQ ID No. 73), PFL_{—}5927 from Pseudomonas protegens Pf-5 (SEQ ID No. 75), PSPPH_{—}4896 from Pseudomonas syringae pv. phaseolicola 1448A (SEQ ID No. 77) or PSPTOT1_{—}2473 from Pseudomonas syringae pv. tomato T1 (SEQ ID No. 79) in combination with an expression vector for the genes alkB, alkG and alkT from the alk operon of Pseudomonas putida GPo1, electrocompetent cells of E. coli JW5020-1 Kan^{S} are produced. This takes place in a manner known to those skilled in the art.

[0418] JW5020-1 Kan^{S} is sequentially transformed with the plasmids
[0419] 1. pBT10 (construction described in practical example B.2 of PCT/EP2008/067447), and
[0420] 2. pJ294[alaDH_B.s._TA_Psyr_{—}4866_Ptac-synUcTE] (SEQ ID No. 81), pJ294[alaDH_B.s._TA_PFL_{—}5927_Ptac-synUcTE] (SEQ ID No. 82), pJ294[alaDH_B.s._TA_PSPPH_{—}4896_Ptac-synUcTE] (SEQ ID No. 83), or pJ294[alaDH_B.s._TA_PSPTOT1_{—}2473_Ptac-synUcTE] (SEQ ID No. 84)
   and plated out onto LB agar plates containing kanamycin (50 μg/ml) and ampicillin (100 μg/ml) t. Transformants are checked for the presence of the correct plasmids by plasmid preparation and analytical restriction analysis.

[0421] In this manner, the following strains are constructed:
[0422] E. coli JW5020-1 Kan^{S} pBT10/pJ294[alaDH_B.s._Psyr_{—}4866_Ptac-synUcTE]
[0423] E. coli JW5020-1 Kan^{S} pBT10/pJ294[alaDH_B.s._TA_PFL_{—}5927_Ptac-synUcTE]
[0424] E. coli JW5020-1 Kan^{S} pBT10pJ294[alaDH_B.s._TA_PSPPH_{—}4896_Ptac-synUcTE]
[0425] E. coli JW5020-1 Kan^{S} pBT10pJ294[alaDH_B.s._TA_PSPTOT1_{—}2473_Ptac-synUcTE]

[0426] These strains are subjected to fed-batch fermentation in order to analyse their capacity for production of hydroxylauric acid, oxolauric acid, carboxylauric acid and aminolauric acid and hydroxytetradecanoic acid, oxotetradecanoic acid, carboxytetradecanoic acid and aminotetradecanoic acid from glucose. This is performed with an 8-fold parallel fermentation system from DASGIP, as described in Example 8.

[0427] It is shown that these strains are capable of forming lauric acid, hydroxylauric acid, oxolauric acid, carboxylauric acid and aminolauric acid and tetradecanoic acid, hydroxytetradecanoic acid, oxotetradecanoic acid, carboxytetradecanoic acid and aminotetradecanoic acid from glucose.

### Example 14

### Production of Methyl Aminolaurate by an E. coli Strain with Deletion in the Gene fadE and Expression Vectors for the Genes synUcTE from Umbellularia californica, alr2355 from Nostoc sp. PCC 7120, Rleg_{—}1610 from Rhizobium leguminasorum bv. trifolii WSM1325, blr1738 (aldA) from Bradyrhizobium japonicum USDA 110 or BMD 5199 from Bacillus megaterium DSM 319 and Cv_{—}2025 from Chromobacterium violaceum in Combination with an Expression Vector for the Genes alkB, alkG, alkT and alkL from the alk Operon of Pseudomonas putida and an Expression Vector for the Genes fadD from Escherichia coli and Wax-dgaT from Acinetobacter sp. ADP1 or atfA1 from Alcanivorax borkumensis

[0428] To create E. coli strains with expression vectors for the genes synUcTE from Umbellularia californica, alr2355 from Nostoc sp. PCC 7120 (SEQ ID No. 85), Rleg 1610 from Rhizobium leguminasorum bv. trifolii WSM1325 (SEQ ID No. 87), blr1738 (aldA) from Bradyrhizobium japonicum USDA 110 (SEQ ID No. 89) or BMD 5199 from Bacillus megaterium DSM 319 (SEQ ID No. 91) and Cv_{—}2025 from Chromobacterium violaceum in combination with an expression vector for the genes alkB, alkG and alkT from the alk operon of Pseudomonas putida GPo1 and an expression vector for the genes fadD from Escherichia coli and wax-dgaT from Acinetobacter sp. ADP1 or atfA1 from Alcanivorax borkumensis, electrocompetent cells of E. coli JW5020-1 Kan^{S} are produced. This takes place in a manner known to those skilled in the art.

[0429] JW5020-1 Kan^{S} is sequentially transformed with the plasmids
[0430] 1. pBT10 (construction described in practical example B.2 of PCT/EP2008/067447), and
[0431] 2. pJ294[alr2355_TA_C.v.(Ct)_Ptac-synUcTE] (SEQ ID No. 93), pJ294[Rleg_{—}1610_TA_C.v.(Ct)_Ptac-synUcTE] (SEQ ID No. 94), pJ294[blr1738TA_C.v.(Ct)_Ptac-synUcTE] (SEQ ID No. 95), or pJ294[BMD_{—}5199_TA_C.v.(Ct)_Ptac-synUcTE] (SEQ ID No. 96),
   [0432] and
[0433] 3. pCDF[wax-dgaT_AsADP1(co_Ec)-fadD_Ec] (SEQ ID No. 16) bzw. pCDF[atfA1_Ab(co_Ec)-fadD_Ec] (SEQ ID No. 17)
   and plated out onto LB agar plates containing kanamycin (50 μg/ml), ampicillin (100 μg/ml) and spectinomycin (100 μg/ml). Transformants are checked for the presence of the correct plasmids by plasmid preparation and analytical restriction analysis.

[0434] The plasmids pJ294[alr2355_TA_C.v.(Ct)_Ptac-synUcTE] (SEQ ID No. 93), pJ294[Rleg_{—}1610_TA_C.v.(Ct)_Ptac-synUcTE] (SEQ ID No. 94), pJ294[blr1738_TA_C.v.(Ct)_Ptac-synUcTE] (SEQ ID No. 95) and pJ294[BMD_{—}5199_TA_C.v.(Ct)_Ptac-synUcTE] (SEQ ID No. 96) are created starting from the plasmid pJ294[alaDH_B.s._TA_C.v.(Ct)_Ptac-synUcTE] (SEQ ID No. 38, in that the gene coding for the alanine dehydrogenase from Bacillus subtilis together with the P_{lacUV5} and the 5′ end of the Cv_{—}2025 gene from Chromobacterium violaceum is cut out of the vector via PstI/EcoNI and replaced by the genes coding for the alanine dehydrogenases alr2355 (SEQ ID No. 86), Rleg_{—}1610 (SEQ ID No. 88), blr1738 (SEQ ID No. 90) or BMD_{—}5199 (SEQ ID No. 92) (incl. P_{lacUV5} and the 5′ end of the Cv_{—}2025 gene from Chromobacterium violaceum). These fragments are created by gene synthesis, wherein the regions coding for alr2355, Rleg_{—}1610, blr1738 and BMD_{—}5199 are not codon-optimized for translation in E. coli, but instead the wild type sequences are used.

[0435] In this manner, the following strains are constructed:
[0436] E. coli JW5020-1 Kan^{S} pBT10/pJ294[alr2355_TA_C.v.(Ct)_Ptac-synUcTE]/pCDF[wax-dgaT_AsADP1(co_Ec)-fadD_Ec]
[0437] E. coli JW5020-1 Kan^{S} pBT10/pJ294[alr2355_TA_C.v.(Ct)_Ptac-synUcTE]/pCDF[affA1_Ab(co_Ec)-fadD_Ec]
[0438] E. coli JW5020-1 Kan^{S} pBT10/pJ294[Rleg_{—}1610_TA_C.v.(Ct)_Ptac-synUcTE]/pCDF[wax-dgaT_AsADP1(co_Ec)-fadD_Ec]
[0439] E. coli JW5020-1 Kan^{S} pBT10/pJ294[Rleg_{—}1610_TA_C.v.(Ct)_Ptac-synUcTE]/pCDF[affA1_Ab(co_Ec)-fadD_Ec]
[0440] E. coli JW5020-1 Kan^{S} pBT10/pJ294[blr1738_TA_C.v.(Ct)_Ptac-synUcTE]/pCDF[wax-dgaT_AsADP1(co_Ec)-fadD_Ec]
[0441] E. coli JW5020-1 Kan^{S} pBT10/pJ294[blr1738_TA_C.v.(Ct)_Ptac-synUcTE]/pCDF[atfA1_Ab(co_Ec)-fadD_Ec]
[0442] E. coli JW5020-1 Kan^{S} pBT10/pJ294[BMD_{—}5199_TA_C.v.(Ct)_Ptac-synUcTE]/pCDF[wax-dgaT_AsADP1(co_Ec)-fadD_Ec]
[0443] E. coli JW5020-1 Kan^{S} pBT10/pJ294[BMD_{—}5199_TA_C.v.(Ct)_Ptac-synUcTE]/pCDF[atfA1_Ab(co_Ec)-fadD_Ec]

[0444] These strains are subjected to a fed-batch fermentation in order to analyse their capacity for production of methyl hydroxylaurate, methyl oxolaurate, methyl carboxylaurate and methyl aminolaurate and methyl hydroxytetradecanoate, methyl oxotetradecanoate, methyl carboxytetradecanoate and methyl aminotetradecanoate from glucose. This is performed with an 8-fold parallel fermentation system from DASGIP, as described in Example 8.

[0445] It is shown that these strains, with addition of 1% (v/v) methanol, are capable of forming methyl laurate, methyl hydroxylaurate, methyl oxolaurate, methyl carboxylaurate and methyl aminolaurate and methyl tetradecanoate, methyl hydroxytetradecanoate, methyl oxotetradecanoate, methyl carboxytetradecanoate and methyl aminotetradecanoate from glucose.

### Example 15

### Production of Aminolauric Acid by an E. coli Strain with Deletion in the Gene fadE and Expression Vectors for the Genes synUcTE from Umbellularia californica, Alr2355 from Nostoc sp. PCC 7120, Rleg_{—}1610 from Rhizobium leguminasorum bv. trifolii WSM1325, blr1738 (aldA) from Bradyrhizobium japonicum USDA 110 or BMD 5199 from Bacillus megaterium DSM 319 and Cv_{—}2025 from Chromobacterium violaceum in Combination with an Expression Vector for the Genes alkB, alkG, alkT and alkL from the Alk Operon of Pseudomonas putida

[0446] To create E. coli strains with expression vectors for the genes synUcTE from Umbellularia californica, alr2355 from Nostoc sp. PCC 7120 (SEQ ID No. 85), Rleg_{—}1610 from Rhizobium leguminasorum bv. trifolii WSM1325 (SEQ ID No. 87), blr1738 (aldA) from Bradyrhizobium japonicum USDA 110 (SEQ ID No. 89) or BMD 5199 from Bacillus megaterium DSM 319 (SEQ ID No. 91) and Cv_{—}2025 from Chromobacterium violaceum in combination with an expression vector for the genes alkB, alkG and alkT from the alk operon of Pseudomonas putida GPo1, electrocompetent cells of E. coli JW5020-1 Kan^{S} are produced. This takes place in a manner known to those skilled in the art.

[0447] JW5020-1 Kan^{S} is sequentially transformed with the plasmids
[0448] 1. pBT10 (construction described in practical example B.2 of PCT/EP2008/067447), and
[0449] 2. pJ294[alr2355_TA_C.v.(Ct)_Ptac-synUcTE] (SEQ ID No. 93), pJ294[Rleg_{—}1610_TA_C.v.(Ct)_Ptac-synUcTE] (SEQ ID No. 94), pJ294[blr1738_TA_C.v.(Ct)_Ptac-synUcTE] (SEQ ID No. 95), or pJ294[BMD_{—}5199_TA_C.v.(Ct)_Ptac-synUcTE] (SEQ ID No. 96)
   and plated out onto LB agar plates containing kanamycin (50 μg/ml) and ampicillin (100 μg/ml). Transformants are checked for the presence of the correct plasmids by plasmid preparation and analytical restriction analysis.

[0450] In this manner, the following strains are constructed:
[0451] E. coli JW5020-1 Kan^{S} pBT10/pJ294[alr2355_TA_C.v.(Ct)_Ptac-synUcTE]
[0452] E. coli JW5020-1 Kan^{S} pBT10/pJ294[Rleg_{—}1610_TA_C.v.(Ct)_Ptac-synUcTE]
[0453] E. coli JW5020-1 Kan^{S} pBT10/pJ294[blr1738_TA_C.v.(Ct)_Ptac-synUcTE]
[0454] E. coli JW5020-1 Kan^{S} pBT10/pJ294[BMD_{—}5199_TA_C.v.(Ct)_Ptac-synUcTE]

[0455] These strains are subjected to a fed-batch fermentation in order to analyse their capacity for production of hydroxylauric acid, oxolauric acid, carboxylauric acid and aminolauric acid and hydroxytetradecanoic acid, oxotetradecanoic acid, carboxytetradecanoic acid and aminotetradecanoic acid from glucose. This is performed with an 8-fold parallel fermentation system from DASGIP, as described in Example 8.

[0456] It is shown that these strains are capable of forming lauric acid, hydroxylauric acid, oxolauric acid, carboxylauric acid and aminolauric acid and tetradecanoic acid, hydroxytetradecanoic acid, oxotetradecanoic acid, carboxytetradecanoic acid and aminotetradecanoic acid from glucose.

### Example 16

### Production of Methyl Aminolaurate by an E. coli Strain with Deletion in the Gene fadE and Expression Vectors for the Genes synUcTE from Umbellularia californica and Cv_{—}2025 from Chromobacterium violaceum in Combination with an Expression Vector for the Genes alkB, alkG, alkT and alkL from the Alk Operon of Pseudomonas putida and an Expression Vector for the Genes fadD from Escherichia coli and Wax-dgaT from Acinetobacter sp. ADP1 or atfA 1 from Alcanivorax borkumensis

[0457] To create E. coli strains with expression vectors for the genes synUcTE from Umbellularia californica and Cv_{—}2025 from Chromobacterium violaceum in combination with an expression vector for the genes alkB, alkG and alkT from the alk operon of Pseudomonas putida GPo1 and an expression vector for the genes fadD from Escherichia coli and wax-dgaT from Acinetobacter sp. ADP1 or atfA1 from Alcanivorax borkumensis, electrocompetent cells of E. coli JW5020-1 Kan^{S} are produced. This takes place in a manner known to those skilled in the art.

[0458] JW5020-1 Kan^{S} is sequentially transformed with the plasmids
[0459] 1. pBT10 (construction described in practical example B.2 of PCT/EP2008/067447), and
[0460] 2. pJ294[TA_C.v.(Ct)_Ptac-synUcTE] (SEQ ID No. 97), and
[0461] 3. pCDF[wax-dgaT_AsADP1(co_Ec)-fadD_Ec] (SEQ ID No. 16), or pCDF[atfA1_Ab(co_Ec)-fadD_Ec] (SEQ ID No. 17)
   and plated out onto LB agar plates containing kanamycin (50 μg/ml), ampicillin (100 μg/ml) and spectinomycin (100 μg/ml). Transformants are checked for the presence of the correct plasmids by plasmid preparation and analytical restriction analysis.

[0462] The plasmid pJ294[TA_C.v.(Ct)_Ptac-synUcTE] (SEQ ID No. 97) is created starting from the plasmid pJ294[alaDH_B.s._TA_C.v.(Ct)_Ptac-synUcTE] (SEQ ID No. 38), in that parts of the gene coding for the alanine dehydrogenase from Bacillus subtilis essential for functional expression are cut out from the vector with PmeI/SnaBI and this is then religated.

[0463] In this manner, the following strains are constructed:
[0464] E. coli JW5020-1 Kan^{S} pBT10/pJ294[TA_C.v.(Ct)_Ptac-synUcTE]/pCDF[wax-dgaT_AsADP1(co_Ec)-fadD_Ec]
[0465] E. coli JW5020-1 Kan^{S} pBT10/pJ294[TA_C.v.(Ct)_Ptac-synUcTE]/pCDF[atfA1_Ab(co_Ec)-fadD_Ec]

[0466] These strains are subjected to a fed-batch fermentation in order to analyse their capacity for production of methyl hydroxylaurate, methyl oxolaurate, methyl carboxylaurate and methyl aminolaurate and methyl hydroxytetradecanoate, methyl oxotetradecanoate, methyl carboxytetradecanoate and methyl aminotetradecanoate from glucose. This is performed with an 8-fold parallel fermentation system from DASGIP, as described in Example 8.

[0467] It is shown that these strains, with addition of 1% (v/v) methanol, are capable of forming methyl laurate, methyl hydroxylaurate, methyl oxolaurate, methyl carboxylaurate and methyl aminolaurate and methyl tetradecanoate, methyl hydroxytetradecanoate, methyl oxotetradecanoate, methyl carboxytetradecanoate and methyl aminotetradecanoate from glucose.

### Example 17

### Production of Aminolauric Acid by an E. coli Strain with Deletion in the Gene fadE and Expression Vectors for the Genes synUcTE from Umbellularia californica and Cv_{—}2025 from Chromobacterium violaceum in Combination with an Expression Vector for the Genes alkB, alkG, alkT and alkL from the Alk Operon of Pseudomonas putida

[0468] To create E. coli strains with expression vectors for the genes synUcTE from Umbellularia californica and Cv_{—}2025 from Chromobacterium violaceum in combination with an expression vector for the genes alkB, alkG and alkT from the alk operon of Pseudomonas putida GPo1, electrocompetent cells of E. coli JW5020-1 Kan^{S} are produced. This takes place in a manner known to those skilled in the art.

[0469] JW5020-1 Kan^{S} is sequentially transformed with the plasmids
[0470] 1. pBT10 (construction described in practical example B.2 of PCT/EP2008/067447), and
[0471] 2. pJ294[TA_C.v.(Ct)_Ptac-synUcTE] (SEQ ID No. 97)
   and plated out onto LB agar plates containing kanamycin (50 μg/ml) and ampicillin (100 μg/ml). Transformants are checked for the presence of the correct plasmids by plasmid preparation and analytical restriction analysis.

[0472] In this manner, the following strain is constructed:
[0473] E. coli JW5020-1 Kan^{S} pBT10/pJ294[TA_C.v.(Ct)_Ptac-synUcTE]

[0474] This strain is subjected to a fed-batch fermentation in order to analyse its capacity for the production of hydroxylauric acid, oxolauric acid, carboxylauric acid and aminolauric acid and hydroxytetradecanoic acid, oxotetradecanoic acid, carboxytetradecanoic acid and aminotetradecanoic acid from glucose. This is performed with an 8-fold parallel fermentation system from DASGIP, as described in Example 8.

[0475] It is shown that this strain is capable of producing lauric acid, hydroxylauric acid, oxolauric acid, carboxylauric acid and aminolauric acid and tetradecanoic acid, hydroxytetradecanoic acid, oxotetradecanoic acid, carboxytetradecanoic acid and aminotetradecanoic acid from glucose.

### Example 18

### Production of methyl aminolaurate by an E. coli strain with deletion in the gene fadE and an expression vector for the gene synUcTE from Umbellularia californica in combination with an expression vector for the genes alkB, alkG, alkT and alkL from the alk operon of Pseudomonas putida and an expression vector for the gene fadD from Escherichia coli and wax-dgaT from Acinetobacter sp. ADP1 or atfA 1 from Alcanivorax borkumensis

[0476] To create E. coli strains with an expression vector for the gene synUcTE from Umbellularia californica in combination with an expression vector for the genes alkB, alkG and alkT from the alk operon of Pseudomonas putida GPo1 and an expression vector for the genes fadD from Escherichia coli and wax-dgaT from Acinetobacter sp. ADP1 or atfA1 from Alcanivorax borkumensis, electrocompetent cells of E. coli JW5020-1 Kan^{S} are produced. This takes place in a manner known to those skilled in the art.

[0477] JW5020-1 Kan^{S} is sequentially transformed with the plasmids
[0478] 1. pBT10 (construction described in practical example B.2 of PCT/EP2008/067447), and
[0479] 2. pJ294[Ptac-synUcTE] (SEQ ID No. 98), and
[0480] 3. pCDF[wax-dgaT_AsADP1(co_Ec)-fadD_Ec] (SEQ ID No. 16), or pCDF[affA1_Ab(co_Ec)-fadD_Ec] (SEQ ID No. 17)
   and plated out onto LB agar plates containing kanamycin (50 μg/ml), ampicillin (100 μg/ml) and spectinomycin (100 μg/ml). Transformants are checked for the presence of the correct plasmids by plasmid preparation and analytical restriction analysis.

[0481] The plasmid pJ294[Ptac-synUcTE] (SEQ ID No. 98) is created starting from the plasmid pJ294[alaDH_B.s._TA_C.v.(Ct)_Ptac-synUcTE] (SEQ ID No. 38), in that parts of the genes coding for the alanine dehydrogenase from Bacillus subtilis and the transaminase Cv_{—}2025 from Chromobacterium violaceum essential for functional expression are cut out from the vector with SrfI/SnaBI and this is then religated.

[0482] In this manner, the following strains are constructed:
[0483] E. coli JW5020-1 Kan^{S} pBT10/pJ294[Ptac-synUcTE]/pCDF[wax-dgaT_AsADP1(co_Ec)-fadD_Ec]
[0484] E. coli JW5020-1 Kan^{S} pBT10/pJ294[Ptac-synUcTE]/pCDF[atfA1_Ab(co_Ec)-fadD_Ec]

[0485] These strains are subjected to a fed-batch fermentation in order to analyse their capacity for production of methyl hydroxylaurate, methyl oxolaurate and methyl carboxylaurate and methyl hydroxytetradecanoate, methyl oxotetradecanoate and methyl carboxytetradecanoate from glucose. This is performed with an 8-fold parallel fermentation system from DASGIP, as described in Example 8.

[0486] It is shown that these strains, with addition of 1% (v/v) methanol, are capable of forming methyl laurate, methyl hydroxylaurate, methyl oxolaurate and methyl carboxylaurate and methyl tetradecanoate, methyl hydroxytetradecanoate, methyl oxotetradecanoate and methyl carboxytetradecanoate from glucose.

### Example 19

### Production of Aminolauric Acid by an E. coli Strain with Deletion in the Gene fadE and an Expression Vector for the Gene synUcTE from Umbellularia californica in Combination with an Expression Vector for the Genes alkB, alkG, alkT and alkL from the Alk Operon of Pseudomonas putida

[0487] To create E. coli strains with an expression vector for the gene synUcTE from Umbellularia californica in combination with an expression vector for the genes alkB, alkG and alkT from the alk operon of Pseudomonas putida GPo1, electrocompetent cells of E. coli JW5020-1 Kan^{S} are produced. This takes place in a manner known to those skilled in the art.

[0488] JW5020-1 Kan^{S} is sequentially transformed with the plasmids
[0489] 1. pBT10 (construction described in practical example B.2 of PCT/EP2008/067447), and
[0490] 2. pJ294[Ptac-synUcTE] (SEQ ID No. 96)
   and plated out onto LB agar plates containing kanamycin (50 μg/ml) and ampicillin (100 μg/ml). Transformants are checked for the presence of the correct plasmids by plasmid preparation and analytical restriction analysis.

[0491] In this manner, the following strain is constructed:
[0492] E. coli JW5020-1 Kan^{S} pBT10/pJ294[Ptac-synUcTE]

[0493] This strain is subjected to a fed-batch fermentation in order to analyse its capacity for the production of hydroxylauric acid, oxolauric acid and carboxylauric acid and hydroxytetradecanoic acid, oxotetradecanoic acid and carboxytetradecanoic acid from glucose. This is performed with an 8-fold parallel fermentation system from DASGIP, as described in Example 8. It is shown that this strain is capable of producing lauric acid, hydroxylauric acid, oxolauric acid and carboxylauric acid and tetradecanoic acid, hydroxytetradecanoic acid, oxotetradecanoic acid and carboxytetradecanoic acid from glucose.

### Example 20

### Production of Methyl Aminohexanoate, Methyl Aminooctanoate, Methyl Aminodecanoate, Methyl Aminotetradecanoate and Methyl Amino-9-Hexadecenoate by E. coli Strains with Deletion of the fadE Gene and Expression Vectors for the Genes synUcTE from Umbellularia californica, ChFATB2 from Cuphea hookeriana, CnFATB3 from Cocos nucifera or CPF 2954 from Clostridium perfringens and Ald from Bacillus subtilis, Cv_{—}2025 from Chromobacterium violaceum in Combination with an Expression Vector for the Genes alkB, alkG and alkT from the Alk Operon of Pseudomonas putida and an Expression Vector for the Gene Mmar_{—}3356 from Mycobacterium marinum or the Gene ′tesA* from E. coli

[0494] To create E. coli strains with expression vectors for the genes synUcTE from Umbellularia californica, ChFATB2 from Cuphea hookeriana (SEQ ID No. 58), CnFATB3 from Cocos nucifera (SEQ ID No. 60) or CPF 2954 from Clostridium perfringens (SEQ ID No. 62) and ald from Bacillus subtilis, and Cv_{—}2025 from Chromobacterium violaceum in combination with an expression vector for the genes alkB, alkG and alkT from the alk operon of Pseudomonas putida GPo1 and an expression vector for the gene Mmar_{—}3356 from Mycobacterium marinum (SEQ ID No. 99) or the gene ′tesA* from E. coli (SEQ ID No. 101), electrocompetent cells of E. coli JW5020-1 Kan^{S} are produced. This takes place in a manner known to those skilled in the art.

[0495] JW5020-1 Kan^{S} is sequentially transformed with the plasmids
[0496] pBT10 (construction described in practical example B.2 of PCT/EP2008/067447), and
[0497] pJ294[alaDH_B.s._TA_C.v.(Ct)_Ptac-synUcTE] (SEQ ID No. 38), pJ294[alaDH_B.s._TA_C.v.(Ct)_Ptac-ChFATB2] (SEQ ID No. 70), pJ294[alaDH_B.s._TA_C.v.(Ct)_Ptac-CnFATB3] (SEQ ID No. 71), or pJ294[alaDH_B.s._TA_C.v.(Ct)_Ptac-CPF_{—}2954] (SEQ ID No. 72), and
[0498] pCDF[Mmar_{—}3356] (SEQ ID No. 103), or pCDF[Ec′tesA*] (SEQ ID No. 104)
   and plated out onto LB agar plates containing kanamycin (50 μg/ml), ampicillin (100 μg/ml) and spectinomycin (100 μg/ml). Transformants are checked for the presence of the correct plasmids by plasmid preparation and analytical restriction analysis.

[0499] The plasmids pCDF[Mmar_{—}3356] (SEQ ID No. 103) and pCDF[Ec′tesA*] (SEQ ID No. 104) are created starting from the plasmid pCDF[wax-dgaT_AsADP1(co_Ec)-fadD_Ec] (SEQ ID No. 16), in that the wax-dgaT gene from Acinetobacter sp. ADP1 and the fadD gene from E. coli are cut out from the vector with BamHI/XhoI incl. P_{tac} and the 3′-flanking region of fadD and replaced by the genes coding for the fatty acid O-methyltransferase Mmar_{—}3356 (SEQ ID No. 100) or the acyl-ACP: methanol O-methyltransferase ′TesA* (SEQ ID No. 102) (incl. P_{tac} and the region identical to the 3′-flanking region of fadD). These fragments are created by gene synthesis, wherein the region coding for the fatty acid O-methyltransferase is codon-optimized for translation in E. coli, while the region coding for the thioester transesterase ′TesA* is not codon-optimized for translation in E. coli, but instead the wild type sequence is used.

[0500] In this manner, the following strains are constructed:
[0501] E. coli JW5020-1 Kan^{S} pBT10/pJ294[alaDH_B.s._TA_C.v.(Ct)_Ptac-synUcTE]/pCDF[Mmar_{—}3356]
[0502] E. coli JW5020-1 Kan^{S} pBT10/pJ294[alaDH_B.s._TA_C.v.(Ct)_Ptac-ChFATB2]/pCDF[Mmar_{—}3356]
[0503] E. coli JW5020-1 Kan^{S} pBT10/pJ294[alaDH_B.s._TA_C.v.(Ct)_Ptac-CnFATB3]/pCDF[Mmar_{—}3356]
[0504] E. coli JW5020-1 Kan^{S} pBT10/pJ294[alaDH_B.s._TA_C.v.(Ct)_Ptac-CPF_{—}2954]/pCDF[Mmar_{—}3356]
[0505] E. coli JW5020-1 Kan^{S} pBT10/pJ294[alaDH_B.s._TA_C.v.(Ct)_Ptac-synUcTE]/pCDF[Ec′tesA*]
[0506] E. coli JW5020-1 Kan^{S} pBT10/pJ294[alaDH_B.s._TA_C.v.(Ct)_Ptac-ChFATB2]/pCDF[Ec′tesA*]
[0507] E. coli JW5020-1 Kan^{S} pBT10/pJ294[alaDH_B.s._TA_C.v.(Ct)_Ptac-CnFATB3]/pCDF[Ec′tesA*]
[0508] E. coli JW5020-1 Kan^{S} pBT10/pJ294[alaDH_B.s._TA_C.v.(Ct)_Ptac-CPF_{—}2954]/pCDF[Ec′tesA*]

[0509] These strains are subjected to a fed-batch fermentation in order to analyse their capacity for production of hydroxy fatty acid methyl esters, oxo fatty acid methyl esters, carboxy fatty acid methyl esters and amino fatty acid methyl esters from glucose. This is performed with an 8-fold parallel fermentation system from DASGIP, as described in Example 8.

[0510] It is shown that the strains E. coli JW5020-1 Kan^{S} pBT10/pJ294[alaDH_B.s._TA_C.v.(Ct)_Ptac-synUcTE]/pCDF[Mmar_{—}3356] and E. coli JW5020-1 Kan^{S} pBT10/pJ294[alaDH_B.s._TA_C.v.(Ct)_Ptac-synUcTE]/pCDF[Ec′tesA*], with addition of 1% (v/v) methanol, are capable of forming methyl laurate, methyl hydroxylaurate, methyl oxolaurate, methyl carboxylaurate and methyl aminolaurate and methyl tetradecanoate, methyl hydroxytetradecanoate, methyl oxotetradecanoate, methyl carboxytetradecanoate and methyl aminotetradecanoate from glucose.

[0511] It is shown that the strains E. coli JW5020-1 Kan^{S} pBT10/pJ294[alaDH_B.s._TA_C.v.(Ct)_Ptac-ChFATB2]/pCDF[Mmar_{—}3356] and E. coli JW5020-1 Kan^{S} pBT10/pJ294[alaDH_B.s._TA_C.v.(Ct)_Ptac-ChFATB2]/pCDF[Ec′tesA*], with addition of 1% (v/v) methanol, are capable of forming methyl octanoate, methyl hydroxyoctanoate, methyl oxooctanoate, methyl carboxyoctanoate and methyl aminooctanoate and methyl decanoate, methyl hydroxydecanoate, methyl oxodecanoate, methyl carboxydecanoate and methyl aminodecanoate from glucose.

[0512] It is shown that the strains E. coli JW5020-1 Kan^{S} pBT10/pJ294[alaDH_B.s._TA_C.v.(Ct)_Ptac-CnFATB3]/pCDF[Mmar_{—}3356] and E. coli JW5020-1 Kan^{S} pBT10/pJ294[alaDH_B.s._TA_C.v.(Ct)_Ptac-CnFATB3]/pCDF[Ec′tesA*], with addition of 1% (v/v) methanol, are capable of forming methyl laurate, methyl hydroxylaurate, methyl oxolaurate, methyl carboxylaurate and methyl aminolaurate and methyl tetradecanoate, methyl hydroxytetradecanoate, methyl oxotetradecanoate, methyl carboxytetradecanoate and methyl aminotetradecanoate and methyl 9-hexadecenoate, methyl hydroxy-9-hexadecenoate, methyl oxo-9-hexadecenoate, methyl carboxy-9-hexadecenoate and methyl amino-9-hexadecenoate from glucose.

[0513] It is shown that the strains E. coli JW5020-1 Kan^{S} pBT10/pJ294[alaDH_B.s._TA_C.v.(Ct)_Ptac-CnFATB3]/pCDF[Mmar_{—}3356] and E. coli JW5020-1 Kan^{S} pBT10/pJ294[alaDH_B.s._TA_C.v.(Ct)_Ptac-CnFATB3]/pCDF[Ec′tesA*], with addition of 1% (v/v) methanol, are capable of forming methyl octanoate, methyl hydroxyoctanoate, methyl oxooctanoate, methyl carboxyoctanoate and methyl aminooctanoate and methyl hexanoate, methyl hydroxyhexanoate, methyl oxohexanoate, methyl carboxyhexanoate and methyl aminohexanoate from glucose.

### Example 21

### Production of Methyl Aminolaurate and Methyl Aminotetradecanoate by E. coli Strains with Deletion of the Gene fadE and Expression Vectors for the Genes synUcTE from Umbellularia californica, and Ald from Bacillus subtilis, and Cv_{—}2025 from Chromobacterium violaceum in Combination with an Expression Vector for the Genes alkM, alkG and alkT from the Alk Operon of Acinetobacter sp. ADP1 or alkS, alkT, alkB1, alkG and alkT from the Alk Operon of Marinobacter aquaeoli VT8 and an Expression Vector for the Genes fadD from Escherichia coli and Wax-dgaT from Acinetobacter sp. ADP1 or affA1 from Alcanivorax borkumensis

[0514] To create E. coli strains with expression vectors for the genes synUcTE from Umbefiularia californica and ald from Bacillus subtilis and Cv_{—}2025 from Chromobacterium violaceum in combination with expression vectors for the genes alkM, alkG and alkT from the alk operon of Acinetobacter sp. ADP1 (SEQ ID No. 105) or alkS, alkT, alkB1, alkG and alkT from the alk operon of Marinobacter aquaeoli VT8 (SEQ ID No. 106) and an expression vector for the genes fadD from Escherichia coli and wax-dgaT from Acinetobacter sp. ADP1 or atfA1 from Alcanivorax borkumensis SK2, electrocompetent cells of E. coli JW5020-1 Kan^{S} are produced. This takes place in a manner known to those skilled in the art.

[0515] JW5020-1 Kan^{S} is sequentially transformed with the plasmids
[0516] 4. pJ294[alaDH_B.s._TA_C.v.(Ct)_Ptac-synUcTE] (SEQ ID No. 38),
[0517] 5. pCDF[wax-dgaT_AsADP1(co_Ec)-fadD_Ec] (SEQ ID No. 16) bzw. pCDF[atfA1_Ab(co_Ec)-fadD_Ec] (SEQ ID No. 17)
[0518] 6. pCOM10-AcalkMGT (SEQ ID No. 107) pCOM10-MaalkST-B1G (SEQ ID No. 108)
   and plated out onto LB agar plates containing kanamycin (50 μg/ml), ampicillin (100 μg/ml) and spectinomycin (100 μg/ml). Transformants are checked for the presence of the correct plasmids by plasmid preparation and analytical restriction analysis.

[0519] The plasmids pCOM10-AcalkMGT (SEQ ID No. 107) and pCOM10-MaalkST-B1G (SEQ ID No. 108) are created starting from the plasmid pCOM10 (SEQ ID No. 109; Smits T H, Seeger M A, Witholt B, van Beilen J B. New alkane-responsive expression vectors for Escherichia coli and Pseudomonas. Plasmid. 2001. 46(1):16-24.). For this, pCOM10 is cleaved with XhoI/BamHI (pCOM10-MaalkST-B1G) or EcoRI (pCOM10-AcalkMGT) and the loci Acinetobacter sp. ADP1 alkMGT or Marinobacter aquaeoli VT8 alkST-alkB1G respectively inserted into pCOM10. These loci are created by gene synthesis, wherein the regions coding for Acinetobacter sp. ADP1 AlkM (SEQ ID No. 110), AlkG (SEQ ID No. 111) and AlkT (SEQ ID No. 112) and those coding for Marinobacter aquaeoli VT8 AlkS (SEQ ID No. 113), AlkT (SEQ ID No. 114), AlkB1 (SEQ ID No. 115) and AlkG (SEQ ID No. 116) are not codon-optimized for translation in E. coli, but instead the wild type sequence is used.

[0520] In this manner, the following strains are constructed:
[0521] E. coli JW5020-1 Kan^{S} pCOM10-AcalkMGT/pJ294[alaDH_B.s._TA_C.v.(Ct)_Ptac-synUcTE]/pCDF[wax-dgaT_AsADP1(co_Ec)-fadD_Ec]
[0522] E. coli JW5020-1 Kan^{S} pCOM10-AcalkMGT/pJ294[alaDH_B.s._TA_C.v.(Ct)_Ptac-synUcTE]/pCDF[atfA1_Ab(co_Ec)-fadD_Ec]
[0523] E. coli JW5020-1 Kan^{S} pCOM10-MaalkST-B1G/pJ294[alaDH_B.s._TA_C.v.(Ct)_Ptac-synUcTE]/pCDF[wax-dgaT_AsADP1(co_Ec)-fadD_Ec]
[0524] E. coli JW5020-1 Kan^{S} pCOM10-MaalkST-B1G/pJ294[alaDH_B.s._TA_C.v.(Ct)_Ptac-synUcTE]/pCDF[atfA1_Ab(co_Ec)-fadD_Ec]

[0525] These strains are subjected to a fed-batch fermentation in order to analyse their capacity for production of hydroxy fatty acid methyl esters, oxo fatty acid methyl esters, carboxy fatty acid methyl esters and amino fatty acid methyl esters from glucose. This is performed with an 8-fold parallel fermentation system from DASGIP, as described in Example 8.

[0526] It is shown that, with addition of 1% (v/v) methanol, these strains are capable of forming methyl laurate, methyl hydroxylaurate, methyl oxolaurate, methyl carboxylaurate and methyl aminolaurate and methyl tetradecanoate, methyl hydroxytetradecanoate, methyl oxotetradecanoate, methyl carboxytetradecanoate and methyl aminotetradecanoate from glucose.

### Example 22

### Production of Aminolauric Acid and Aminotetradecanoic Acid by E. coli Strains with Deletion of the Gene fadE and Expression Vectors for the Genes synUcTE from Umbellularia californica, and ald from Bacillus subtilis, and Cv_{—}2025 from Chromobacterium violaceum in Combination with an Expression Vector for the Genes alkM, alkG and alkT from the Alk Operon of Acinetobacter sp. ADP1 or alkS, alkT, alkB1, alkG and alkT from the Alk Operon of Marinobacter aquaeoli VT8

[0527] To create E. coli strains with expression vectors for the genes synUcTE from Umbellularia californica and ald from Bacillus subtilis and Cv_{—}2025 from Chromobacterium violaceum in combination with expression vectors for the genes alkM, alkG and alkT from the alk operon of Acinetobacter sp. ADP1 (SEQ ID No. 105) or alkS, alkT, alkB1, alkG and alkT from the alk operon of Marinobacter aquaeoli VT8 (SEQ ID No. 106), electrocompetent cells of E. coli JW5020-1 Kan^{S} are produced. This takes place in a manner known to those skilled in the art.

[0528] JW5020-1 Kan^{S} is sequentially transformed with the plasmids
[0529] 1. pJ294[alaDH_B.s._TA_C.v.(Ct)_Ptac-synUcTE] (SEQ ID No. 38),
[0530] 2. pCOM10-AcalkMGT (SEQ ID No. 107) pCOM10-MaalkST-B1G (SEQ ID No. 108)
   and plated out onto LB agar plates containing kanamycin (50 μg/ml) and ampicillin (100 μg/ml). Transformants are checked for the presence of the correct plasmids by plasmid preparation and analytical restriction analysis.

[0531] In this manner, the following strains are constructed:
[0532] E. coli JW5020-1 Kan^{S} pCOM10-AcalkMGT/pJ294[alaDH_B.s._TA_C.v.(Ct)_Ptac-synUcTE]
[0533] E. coli JW5020-1 Kan^{S} pCOM10-AcalkMGT/pJ294[alaDH_B.s._TA_C.v.(Ct)_Ptac-synUcTE]
[0534] E. coli JW5020-1 Kan^{S} pCOM10-MaalkST-B1G/pJ294[alaDH_B.s._TA_C.v.(Ct)_Ptac-synUcTE]
[0535] E. coli JW5020-1 Kan^{S} pCOM10-MaalkST-B1G/pJ294[alaDH_B.s._TA_C.v.(Ct)_Ptac-synUcTE]

[0536] These strains are subjected to a fed-batch fermentation in order to analyse their capacity for production of hydroxy fatty acids, oxo fatty acids, carboxy fatty acids and amino fatty acids from glucose. This is performed with an 8-fold parallel fermentation system from DASGIP, as described in Example 8.

[0537] It is shown that these strains are capable of forming lauric acid, hydroxylauric acid, oxolauric acid, carboxylauric acid and aminolauric acid and tetradecanoic acid, hydroxytetradecanoic acid, oxotetradecanoic acid, carboxytetradecanoic acid and aminotetradecanoic acid from glucose.

### Example 23

### Production of Methyl Aminolaurate and Methyl Aminotetradecanoate by E. coli Strains with Deletion of the Gene fadE and Expression Vectors for the Genes synUcTE from Umbellularia californica, and Ald from Bacillus subtilis, and Cv_{—}2025 from Chromobacterium violaceum in Combination with an Expression Vector for the Genes ABO_{—}0200, ABO_{—}0201 and ABO_{—}0203 from Alcanivorax borkumensis SK2 and an Expression Vector for the Genes fadD from Escherichia coli and Wax-dgaT from Acinetobacter sp. ADP1 or atfA1 from Alcanivorax borkumensis

[0538] To create E. coli strains with expression vectors for the genes synUcTE from Umbellularia californica and ald from Bacillus subtilis and Cv_{—}2025 from Chromobacterium violaceum in combination with an expression vector for the genes ABO_{—}0200, ABO_{—}0201 and ABO_{—}0203 from Alcanivorax borkumensis SK2 (SEQ ID No. 117), coding for a ferredoxin (ABO_{—}0200; SEQ ID No. 118), a CYP_{—}153 monooxygenase (ABO_{—}0201; SEQ ID No. 119) and a ferredoxin oxidoreductase (ABO_{—}0203; SEQ ID No. 120) and an expression vector for the genes fadD from Escherichia coli and wax-dgaT from Acinetobacter sp. ADP1 or atfA1 from Alcanivorax borkumensis SK2, electrocompetent cells of E. coli JW5020-1 Kan^{S} are produced. This takes place in a manner known to those skilled in the art.

[0539] JW5020-1 Kan^{S} is sequentially transformed with the plasmids
[0540] 1. pJ294[alaDH_B.s._TA_C.v.(Ct)_Ptac-synUcTE] (SEQ ID No. 38),
[0541] 2. pCDF[wax-dgaT_AsADP1(co_Ec)-fadD_Ec] (SEQ ID No. 16) bzw. pCDF[atfA1_Ab(co_Ec)-fadD_Ec] (SEQ ID No. 17)
[0542] 3. pCOM10-AbCYP_{—}153 (SEQ ID No. 121)
   and plated out onto LB agar plates containing kanamycin (50 μg/ml), ampicillin (100 μg/ml) and spectinomycin (100 μg/ml). Transformants are checked for the presence of the correct plasmids by plasmid preparation and analytical restriction analysis.

[0543] The plasmid pCOM10-AbCYP_{—}153 (SEQ ID No. 121) is created starting from the plasmid pCOM10 (SEQ ID No. 97; Smits T H, Seeger M A, Witholt B, van Beilen J B. New alkane-responsive expression vectors for Escherichia coli and Pseudomonas. Plasmid. 2001. 46(1):16-24.). For this, pCOM10 is cleaved with EcoRI/SalI and the fragment containing the genes ABO_{—}0200, ABO_{—}0201 and ABO_{—}0203 from Alcanivorax borkumensis SK2 inserted.

[0544] This fragment is created by gene synthesis, wherein the sections from Alcanivorax borkumensis SK2 coding for the ferredoxin (ABO_{—}0200; SEQ ID No. 106), the CYP_{—}153 monooxygenase ABO_{—}0201; SEQ ID No. 107) and the ferredoxin oxidoreductase (ABO_{—}0203; SEQ ID No. 108) are not codon-optimized for translation in E. coli, but instead the wild type sequence is used.

[0545] In this manner, the following strains are constructed:
[0546] E. coli JW5020-1 Kan^{S} pCOM10-AbCYP_{—}153/pJ294[alaDH_B.s._TA_C.v.(Ct)_Ptac-synUcTE]/pCDF[wax-dgaT_AsADP1(co_Ec)-fadD_Ec]
[0547] E. coli JW5020-1 Kan^{S} pCOM10-AbCYP_{—}153/pJ294[alaDH_B.s._TA_C.v.(Ct)_Ptac-synUcTE]/pCDF[atfA1_Ab(co_Ec)-fadD_Ec]

[0548] These strains are subjected to a fed-batch fermentation in order to analyse their capacity for production of hydroxy fatty acid methyl esters, oxo fatty acid methyl esters, carboxy fatty acid methyl esters and amino fatty acid methyl esters from glucose. This is performed with an 8-fold parallel fermentation system from DASGIP, as described in Example 8.

[0549] It is shown that, with addition of 1% (v/v) methanol, these strains are capable of forming methyl laurate, methyl hydroxylaurate, methyl oxolaurate, methyl carboxylaurate and methyl aminolaurate and methyl tetradecanoate, methyl hydroxytetradecanoate, methyl oxotetradecanoate, methyl carboxytetradecanoate and methyl aminotetradecanoate from glucose.

### Example 24

### Production of Aminolauric Acid and Aminotetradecanoic Acid by E. coli Strains with Deletion of the Gene fadE and Expression Vectors for the Genes synUcTE from Umbellularia californica, and ald from Bacillus subtilis, and Cv_{—}2025 from Chromobacterium violaceum in Combination with an Expression Vector for the Genes ABO_{—}0200, ABO_{—}0201 and ABO_{—}0203 from Alcanivorax borkumensis SK2

[0550] To create E. coli strains with expression vectors for the genes synUcTE from Umbellularia californica and ald from Bacillus subtilis and Cv_{—}2025 from Chromobacterium violaceum in combination with an expression vector for the genes ABO_{—}0200, ABO_{—}0201 and ABO_{—}0203 from Alcanivorax borkumensis SK2 (SEQ ID No. 117), coding for a ferredoxin (ABO_{—}0200; SEQ ID No. 118), a CYP_{—}153 monooxygenase (ABO_{—}0201; SEQ ID No. 119) and a ferredoxin oxidoreductase (ABO_{—}0203; SEQ ID No. 120), electrocompetent cells of E. coli JW5020-1 Kan^{S} are produced. This takes place in a manner known to those skilled in the art.

[0551] JW5020-1 Kan^{S} is sequentially transformed with the plasmids
[0552] 1. pJ294[alaDH_B.s._TA_C.v.(Ct)_Ptac-synUcTE] (SEQ ID No. 38) and
[0553] 2. pCOM10-AbCYP_{—}153 (SEQ ID No. 121) and plated out onto LB agar plates containing kanamycin (50 μg/ml) and ampicillin (100 μg/ml). Transformants are checked for the presence of the correct plasmids by plasmid preparation and analytical restriction analysis.

[0554] In this manner, the following strain is constructed:
[0555] E. coli JW5020-1 Kan^{S} pCOM10-AbCYP_{—}153/pJ294[alaDH_B.s._TA_C.v.(Ct)_Ptac-synUcTE]

[0556] This strain is subjected to a fed-batch fermentation in order to analyse its capacity for the production of hydroxy fatty acids, oxo fatty acids, carboxy fatty acids and amino fatty acids from glucose. This is performed with an 8-fold parallel fermentation system from DASGIP, as described in Example 8.

[0557] It is shown that this strain is capable of forming lauric acid, hydroxylauric acid, oxolauric acid, carboxylauric acid and aminolauric acid and tetradecanoic acid, hydroxytetradecanoic acid, oxotetradecanoic acid, carboxytetradecanoic acid and aminotetradecanoic acid from glucose.

1. A microorganism comprising:
a first genetic engineering modification, so that compared to its wild type it is capable of forming more carboxylic acid or carboxylate ester from at least one simple carbon source, and
a second genetic engineering modification, such that the microorganism in comparison to its wild type displays increased activity of at least one enzyme E₁ that catalyzes the conversion of a carboxylic acid or a carboxylate ester to a corresponding ω-hydroxycarboxylic acid or ω-hydroxy-carboxylate ester.

2. The microorganism of claim 1, wherein the enzyme E₁ is an E₁ₐ P450 alkane hydroxylase or an E_{1b} AlkB alkane hydroxylase of EC 1.14.15.3.

3. The microorganism of claim 1, wherein the second genetic modification is such that the microorganism in comparison to its wild type displays increased activity of at least one enzyme selected from the group consisting of:
an enzyme E₂ that catalyzes the conversion of an ω-oxocarboxylic acid or an ω-oxocarboxylate ester to the corresponding ω-aminocarboxylic acid or ω-aminocarboxylate ester,
an enzyme E₃ that catalyzes the conversion of an α-ketocarboxylic acid to an amino acid,
an enzyme E₄ that catalyzes the conversion of an ω-hydroxycarboxylic or an ω-hydroxycarboxylate ester to the corresponding ω-oxocarboxylic acid or ω-oxocarboxylate ester, and
an enzyme E₅ that catalyzes the conversion of an ω-oxocarboxylic acid or an ω-oxocarboxylate ester to the corresponding ω-carboxycarboxylic acid or ω-carboxycarboxylate ester.

4. The microorganism of claim 3, wherein the second genetic modification comprises a combination of increased activities of the enzymes selected from the group consisting of E₁E₂E₃, E₁E₂E₃E₄, E₁E₅ and E₁E₄E₅.

5. The microorganism of claim 3, wherein:
the enzyme E₂ is an ω-transaminase,
the enzyme E₃ is an alanine dehydrogenase of EC 1.4.1.1,
the enzyme E₄ is a fatty alcohol oxidase of EC 1.1.3.20, an AlkJ alcohol dehydrogenase of EC 1.1.99.- or an alcohol dehydrogenase of EC 1.1.1.1 or EC 1.1.1.2, and
the enzyme E₅ is an aldehyde dehydrogenase of EC 1.2.1.3, EC 1.2.1.4 or EC 1.2.1.5.

6. The microorganism of claim 1, wherein the enzyme E₁ is an alkane monooxygenase from Pseudomonas putida GPo1 encoded by alkBGT or a protein having a polypeptide sequence wherein up to 60% of the amino acid residues compared to the alkane monooxygenase sequence are modified by deletion, insertion, substitution or a combination thereof and which still possesses at least 50% of the activity of the alkane monooxygenase.

7. The microorganism of claim 1, wherein the second genetic modification is such that compared to its wild type the microorganism forms more alkL gene product.

8. The microorganism of claim 7, wherein the alkL gene product is encoded by an alkL gene of gram-negative bacteria.

9. The microorganism of claim 7, wherein the alkL gene product is selected from the group consisting of:
a protein encoded by SEQ ID NO:1,
a protein encoded by SEQ ID NO:3,
a protein comprising a polypeptide sequence selected from the group consisting of SEQ ID NOs: 2, 4, 5, 6 and 7, and
a protein having a polypeptide sequence wherein up to 60% of the amino acid residues compared to SEQ ID NO: 2, 4, 5, 6 or 7 are modified by deletion, insertion, substitution or a combination thereof and which still possesses at least 50% of the activity of the protein with the respective reference sequence SEQ ID NO: 2, 4, 5, 6 or 7.

10. The microorganism of claim 1, which is a species selected from the group consisting of:
E. coli, Pseudomonas sp., Pseudomonas fluorescens, Pseudomonas putida, Pseudomonas stutzeri, Acinetobacter sp., Burkholderia sp., Burkholderia thailandensis, Cyanobakterien, Klebsiella sp., Klebsiella oxytoca, Salmonella sp., Rhizobium sp. and Rhizobium meliloti, Bacillus sp., Bacillus subtilis, Clostridium sp., Corynebacterium sp., Corynebacterium glutamicum, Brevibacterium sp., Chlorella sp. and Nostoc sp.

11. The microorganism of claim 1, wherein the first genetic modification is, compared to the enzymatic activity of the wild type of the microorganism, increased activity of at least one of the enzymes selected from the group consisting of:
E₁ Acyl-ACP thioesterase,
Eᵢᵢ Acyl-CoA thioesterase,
E_{iib} Acyl-CoA:ACP transacylase,
Eᵢᵢᵢ Polyketide synthase, which catalyses a reaction which is involved in the synthesis of a carboxylic acid or a carboxylate ester, and
Eᵢᵥ Hexanoic acid synthase.

12. The microorganism of claim 1, further comprising a third genetic modification which comprises, compared with the enzymatic activity of the wild type of the microorganism, increased activity of at least one of the enzymes E_{iib}, Eᵥ, Eᵥᵢ, or Eᵥᵢᵢ which is involved in the conversion of carboxylic acids or ω-functionalized carboxylic acids to carboxylate esters or ω-functionalized carboxylate esters, selected from the group consisting of:
E_{iib} Acyl-CoA:ACP transacylase, which converts an ACP thioester into a CoA thioester or a CoA thioester into an ACP thioester,
Eᵥ Wax ester synthase or alcohol O-acyltransferase, which catalyses the synthesis of an ester from an acyl-coenzyme A thioester or an acyl-ACP thioester and an alcohol,
Eᵥᵢ Acyl-CoA (coenzyme A) synthetase, which catalyses the synthesis of an acyl-coenzyme A thioester, and
Eᵥᵢᵢ Acyl thioesterase, which catalyses the conversion of an acyl thioester with an alcohol to a carboxylate ester.

13. The microorganism of claim 12, wherein the third genetic modification comprises a combination of increased activities of the enzymes selected from the group consisting of Eᵥ, Eᵥᵢᵢ, EᵥEᵥᵢ, EᵥᵢEᵥᵢᵢ and Eᵥᵢ, EᵥᵢᵢE_{iib}.

14. The microorganism of claim 1, further comprising a fourth genetic modification which comprises, compared with the enzymatic activity of the wild type of the microorganism, increased activity of at least one of the enzymes selected from the group consisting of:
E_{iib} Acyl-CoA (coenzyme A):ACP (acyl carrier protein) transacylase, which converts an ACP thioester into a CoA thioester or a CoA thioester into an ACP thioester,
Eᵥᵢ Acyl-CoA (coenzyme A) synthetase, which preferably catalyses the synthesis of an acyl-coenzyme A thioester,
Eᵥᵢᵢᵢ Acyl-CoA (coenzyme A) reductase, which preferentially catalyses the reduction of an acyl-coenzyme A thioester to the corresponding alkan-1-al or alkan-1-ol
Eᵢₓ Fatty acid reductase, also fatty aldehyde dehydrogenase or arylaldehyde oxidoreductase, which preferentially catalyses the reduction of an alkanoic acid to the corresponding alkan-1-al, and
Eₓ Acyl-ACP (acyl carrier protein) reductase, which preferentially catalyses the reduction of an acyl-ACP thioester to the corresponding alkan-1-al or alkan-1-ol.

15. The microorganism of claim 14, wherein the second genetic modification comprises a combination of increased activities of the enzymes selected from the group consisting of Eᵥᵢᵢᵢ, Eᵢₓ, Eₓ, EᵥᵢEᵥᵢᵢᵢ, and EᵥᵢEₓE_{iib}.

16. The microorganism of claim 1, further comprising a fifth genetic modification which comprises, compared with the enzymatic activity of the wild type of the microorganism, decreased activity of at least one of the enzymes selected from the group consisting of:
Eₐ Acyl-CoA synthetase, which catalyses the synthesis of an acyl-coenzyme A thioester,
E_{b} Acyl-CoA dehydrogenase, which catalyses the oxidation of an acyl-coenzyme A thioester to the corresponding enoyl-coenzyme A thioester,
E_{c} Acyl-CoA-oxidase, which catalyses the oxidation of an acyl-coenzyme A thioester to the corresponding enoyl-coenzyme A thioester,
E_{d} Enoyl-CoA hydratase, which catalyses the hydration of an enoyl-coenzyme A thioester to the corresponding 3-hydroxyacyl-coenzyme A thioester,
Eₑ 3-hydroxyacyl-CoA dehydrogenase, which catalyses the oxidation of a 3-hydroxyacyl-coenzyme A thioester to the corresponding 3-oxoacyl-coenzyme A thioester and
E_{f} Acetyl-CoA acyltransferase, which catalyses the transfer of an acyl residue from a 3-oxoacyl-coenzyme A thioester to Coenzyme A and thereby creates an acyl-coenzyme A thioester shortened by two carbon atoms.

17. (canceled)

18. A process for producing an ω-functionalized carboxylic acid or an ω-functionalized carboxylate ester from a simple carbon source, the process comprising:
I) contacting the microorganism of claim 1 with a medium comprising a simple carbon source,
II) culturing the microorganism under conditions that enable the microorganism to form the ω-functionalized carboxylic acid or ω-functionalized carboxylate ester from the simple carbon source and
III) optionally isolating the ω-functionalized carboxylic acid or ω-functionalized carboxylate ester formed.

19. The process of claim 18, wherein the ω-functionalized carboxylic acid is an ω-aminocarboxylic acid, or wherein the ω-functionalized carboxylate ester is an ω-aminocarboxylate ester.

20. A process for producing a polyamide based on an ω-aminocarboxylic acid, the process comprising:
(a1) producing an ω-aminocarboxylic acid by the process of claim, and
(a2) polymerizing the ω-aminocarboxylic acid produced in (a1), optionally with an ω-aminocarboxylic not produced in (a1), to obtain a polyamide.

21. A polyamide obtained by the process of claim 20.

22. The process of claim 18, wherein the ω-functionalized carboxylic acid is an ω-hydroxycarboxylic acid, or wherein the ω-functionalized carboxylate ester is an ω-hydroxycarboxylate ester.

23. The process of claim 18, wherein the ω-functionalized carboxylic acid is an ω-carboxycarboxylic acid, or wherein the ω-functionalized carboxylate ester is an ω-carboxycarboxylate ester.

The application's sequence listing, which the Patent Office published only in electronic form, follows.

SEQUENCE LISTING (121 sequences)

SEQ ID NO: 1 - DNA, 693 bp, Pseudomonas putida
  CDS (1)..(693)
atgagtttttctaattataaagtaatcgcgatgccggtgttggttgctaattttgttttgggggcggccactgcatgggcgaatgaaaattatccggcgaaatctgctggctataatcagggtgactgggtcgctagcttcaatttttctaaggtctatgtgggtgaggagcttggcgatctaaatgttggagggggggctttgccaaatgctgatgtaagtattggtaatgatacaacacttacgtttgatatcgcctattttgttagctcaaatatagcggtggatttttttgttggggtgccagctagggctaaatttcaaggtgagaaatcaatctcctcgctgggaagagtcagtgaagttgattacggccctgcaattctttcgcttcaatatcattacgatagctttgagcgactttatccatatgttggggttggtgttggtcgggtgctattttttgataaaaccgacggtgctttgagttcgtttgatattaaggataaatgggcgcctgcttttcaggttggccttagatatgaccttggtaactcatggatgctaaattcagatgtgcgttatattcctttcaaaacggacgtcacaggtactcttggcccggttcctgtttctactaaaattgaggttgatcctttcattctcagtcttggtgcgtcatatgttttctaa

SEQ ID NO: 2 - protein, 230 aa, Pseudomonas putida
MSFSNYKVIAMPVLVANFVLGAATAWANENYPAKSAGYNQGDWVASFNFSKVYVGEELGDLNVGGGALPNADVSIGNDTTLTFDIAYFVSSNIAVDFFVGVPARAKFQGEKSISSLGRVSEVDYGPAILSLQYHYDSFERLYPYVGVGVGRVLFFDKTDGALSSFDIKDKWAPAFQVGLRYDLGNSWMLNSDVRYIPFKTDVTGTLGPVPVSTKIEVDPFILSLGASYVF

SEQ ID NO: 3 - DNA, 693 bp, Pseudomonas putida
  CDS (1)..(693)
atgaatccgcctattttaaaaaaactcgctatgtcgatattagcaactagttttgtgttgggtggggccagtgcgtggtcaggtgaaatctattcgactgaaactgctggctacaatcagggcgactgggttgctagctttaatatgtctaaagtttatgtagacgagacgctaggctccctaaatgtaggtggggctactgtacccaatgctgctgtaagcatcggtaatgatacaacagtttcttttgatatttcctattttattagtaacaatgtagctttggattttttcgtcgggattccagctaaagctaagtttcaaggtgaaaaatccatctctgcgctgggaagagtcagtgaagttgattatggccctgcaattttgtcacttcagtatcattttgataattttgagcgactttatccatatgtcggactaggtgtcggtcgagtgtttttcttcgacaaaactgatggtgccttgacttcatttgatatcaaagataaatgggcgcctgctgttcaggtcggccttagatatgattttggtaactcatggatgttaaattcagatgtgcgctatattcctttcaaaacagatgtttctggtacacttggggctgcacctgtttctaccaagattgagattgatcctttcattctgagtcttggagcatcatataagttctga

SEQ ID NO: 4 - protein, 230 aa, Pseudomonas putida
MNPPILKKLAMSILATSFVLGGASAWSGEIYSTETAGYNQGDWVASFNMSKVYVDETLGSLNVGGATVPNAAVSIGNDTTVSFDISYFISNNVALDFFVGIPAKAKFQGEKSISALGRVSEVDYGPAILSLQYHFDNFERLYPYVGLGVGRVFFFDKTDGALTSFDIKDKWAPAVQVGLRYDFGNSWMLNSDVRYIPFKTDVSGTLGAAPVSTKIEIDPFILSLGASYKF

SEQ ID NO: 5 - protein, 246 aa, Marinobacter aquaeolei VT8
MCYEKLQFYLKPICFNTKKDNKKMKPKIISKVSLVAFLLLSLAASLANAQSEPVYSRGDWVVGLNATRVLTDEDLRSASAGGAPVPNSNLSINNDTTVSFDVSYFLSNQLAFNIFGGIPASADLQGEESLSGLFLGQTDYGPVILSLQYHVLTGSNFSPYFGAGVGRILFLDEKDRALTDFDVEDTWAPAIQAGFRWRIHNNWSANFDVRYAPFKADITGNLGPAPVQAEVEVDPTIVSIGVAYRF

SEQ ID NO: 6 - protein, 228 aa, Oceanicaulis alexandrii HTCC2633
MKQSNVKSKGPFASKFVLITMIGGFSSFSVANAEPLYSKGDWLFGLNAAKVFTNETLDSISAGGAPIPGAGVNITDDTTLSFDVSYFLNSSVALNFFGGLPASANLAGSGSLAGLPVGETEYGPAVLSLQYHFSTNSSVSPYVGAGIARILFLEEQGDALADFDLKDAWAPAVQVGMRYQMSDNWFANADIRYTPFETDISGTLGGAPVRGKISVDPTILNIGIAYRF

SEQ ID NO: 7 - protein, 227 aa, Caulobacter sp. K31
MRKNGAYMYARLAQYATALAVLSVFPQAALAQNSEGFKLWAVSLNATRVFVDEDAPDITLAGGPVPGSNVRIGDATSATIDIGYFFTPNVAGNLFLGVPATAQIDGAGSLEPLGTLAKVNYGPIILSAQYHFNNLGKVHPYLGVGVGRIVFLNERDRALLNFSIDDSWAPAAQVGVRYELGAEWMLNADVRYVPFSTHATGSLGGAPVRTRLDIDPILTSAGVTYRF

SEQ ID NO: 8 - protein, 453 aa, Pseudomonas putida
MSVNNPQTREWQTLSGEHHLAPFSDYKQLKEKGPRIITKAQGVHLWDSEGHKILDGMAGLWCVAVGYGREELVQAAEKQMRELPYYNLFFQTAHPPALELAKAITDVAPEGMTHVFFTGSGSEGNDTVLRMVRHYWALKGKPHKQTIIGRINGYHGSTFAGACLGGMSGMHEQGGLPIPGIVHIPQPYWFGEGGDMTPDAFGIWAAEQLEKKILEVGEDNVAAFIAEPIQGAGGVIIPPETYWPKVKEILAKYDILFVADEVICGFGRTGEWFGSDYYDLKPDLMTIAKGLTSGYIPMGGVIVRDKVAKVISEGGDFNHGFTYSGHPVAAAVGLENLRILRDEQIVEKARTEAAPYLQKRLRELQDHPLVGEVRGLGMLGAIELVKDKATRSRYEGKGVGMICRTFCFENGLIMRAVGDTMIIAPPLVISHAEIDELVEKARKCLDLTLEAIR

SEQ ID NO: 9 - protein, 452 aa, Pseudomonas putida
MSEQNSQTLAWQSMSRDHHLAPFSDVKQLAEKGPRIITSAKGVYLWDSEGNKILDGMAGLWCVAVGYGRDELAEVASQQMKQLPYYNLFFQTAHPPALELAKAIADVAPQGMNHVFFTGSGSEGNDTVLRMVRHYWALKGKKNKNVIIGRINGYHGSTVAGAALGGMSGMHQQGGVIPDIVHIPQPYWFGEGGDMTEADFGVWAAEQLEKKILEVGVDNVAAFIAEPIQGAGGVIIPPQTYWPKVKEILARYDILFVADEVICGFGRTGEWFGTDYYDLKPDLMTIAKGLTSGYIPMGGVIVRDEVAKVISEGGDFNHGFTYSGHPVAAAVGLENLRILRDEQIIQQVHDKTAPYLQQRLRELADHPLVGEVRGLGMLGAIELVKDKATRARYEGKGVGMICRQHCFDNGLIMRAVGDTMIIAPPLVISIEEIDELVEKARKCLDLTYEAVR

SEQ ID NO: 10 - DNA, 918 bp, Cuphea palustris
atgctggaccgcaaatccaaacgccctgacatgctggtcgaacctctgggtgttgatcgtatcgtctacgatggtgttagctttcgtcagagcttcagcattcgcagctacgagatcggcgctgatcgcactgcgtctattgaaaccctgatgaacatgtttcaggaaacgtcgctgaatcactgcaaaatcattggcctgttgaacgatggcttcggccgtaccccggagatgtgtaagcgtgacctgatctgggtcgtcacgaagatgcagattgaagtgaatcgttatccgacctggggtgataccatcgaggtgaatacgtgggtgtccgccagcggtaagcacggtatgggccgtgactggctgatttctgactgtcataccggtgagatcctgattcgtgcgaccagcgtgtgggccatgatgaaccagaaaactcgtcgcctgagcaaaatcccgtacgaagtgcgtcaggagatcgagccgcaattcgtggacagcgcaccggttattgttgacgatcgcaaattccataaactggatctgaaaaccggcgacagcatttgcaacggtctgacgccgcgttggacggatctggacgtcaaccaacacgtcaataatgtgaagtacattggttggatcttgcagagcgttccgaccgaagtgtttgaaacgcaagagctgtgcggcttgaccctggagtatcgtcgcgagtgtggtcgtgactccgttttggagtctgttaccgcaatggacccaagcaaggaaggtgatcgtagcctgtatcaacacctgctgcgcctggaggacggtgcggatattgttaagggccgtaccgaatggcgtccgaagaacgcgggtgcgaaaggtgcaatcctgacgggtaagaccagcaacggcaatagcatcagctaa

SEQ ID NO: 11 - DNA, 1137 bp, Bacillus subtilis
atgatcataggggttcctaaagagataaaaaacaatgaaaaccgtgtcgcattaacacccgggggcgtttctcagctcatttcaaacggccaccgggtgctggttgaaacaggcgcgggccttggaagcggatttgaaaatgaagcctatgagtcagcaggagcggaaatcattgctgatccgaagcaggtctgggacgccgaaatggtcatgaaagtaaaagaaccgctgccggaagaatatgtttattttcgcaaaggacttgtgctgtttacgtaccttcatttagcagctgagcctgagcttgcacaggccttgaaggataaaggagtaactgccatcgcatatgaaacggtcagtgaaggccggacattgcctcttctgacgccaatgtcagaggttgcgggcagaatggcagcgcaaatcggcgctcaattcttagaaaagcctaaaggcggaaaaggcattctgcttgccggggtgcctggcgtttcccgcggaaaagtaacaattatcggaggaggcgttgtcgggacaaacgcggcgaaaatggctgtcggcctcggtgcagatgtgacgatcattgacttaaacgcagaccgcttgcgccagcttgatgacatcttcggccatcagattaaaacgttaatttctaatccggtcaatattgctgatgctgtggcggaagcggatctcctcatttgcgcggtattaattccgggtgctaaagctccgactcttgtcactgaggaaatggtaaaacaaatgaaacccggttcagttattgttgatgtagcgatcgaccaaggcggcatcgtcgaaactgtcgaccatatcacaacacatgatcagccaacatatgaaaaacacggggttgtgcattatgctgtagcgaacatgccaggcgcagtccctcgtacatcaacaatcgccctgactaacgttactgttccatacgcgctgcaaatcgcgaacaaaggggcagtaaaagcgctcgcagacaatacggcactgagagcgggtttaaacaccgcaaacggacacgtgacctatgaagctgtagcaagagatctaggctatgagtatgttcctgccgagaaagctttacaggatgaatcatctgtggcgggtgcttaa

SEQ ID NO: 12 - DNA, 1380 bp, Chromobacterium violaceum
atgcagaaacagcgtaccacctctcagtggcgtgaactcgatgcggcgcatcatctccatccgtttaccgataccgcgagcctcaatcaggcgggtgcgcgtgtgatgacccgtggcgaaggcgtgtatctctgggatagcgaaggcaacaaaattattgatggcatggcgggcctctggtgcgtgaacgtgggctatggccgtaaagattttgcggaagcggcgcgtcgtcagatggaagaactcccgttttataacaccttctttaaaaccacccatccggcggtggtggaactcagcagcctcctcgccgaagttaccccggcaggttttgatcgtgtgttttataccaacagcggcagcgaaagcgtggataccatgattcgtatggtgcgtcgttattgggatgtgcagggcaaaccggaaaaaaaaaccctcattggccgttggaacggctatcacggcagcaccattggcggtgcgagcctcggcggcatgaaatatatgcatgaacagggcgatctcccgattccgggcatggcgcatattgaacagccgtggtggtataaacatggcaaagatatgaccccggatgaatttggcgtggttgcggcgcgttggctcgaagaaaaaattctcgaaatcggcgcggataaagtggcggcgtttgtgggcgaaccgattcagggtgcgggcggtgtgattgttccgccggcaacctattggccggaaattgaacgtatttgccgcaaatatgatgtgctcctcgttgcggatgaagtgatttgcggctttggccgtaccggcgaatggtttggccatcagcattttggctttcagccggacctctttaccgcggcgaaaggcctcagcagcggctatctcccgattggcgcggtgtttgtgggcaaacgtgttgcggaaggtctcattgcgggcggtgattttaaccatggctttacctatagcggccatccggtgtgtgcggcggtggcgcatgcgaatgttgcggcgctccgtgatgaaggcattgtgcagcgtgtgaaagatgatattggcccgtatatgcagaaacgttggcgtgaaacctttagccgttttgaacatgtggatgatgtgcgtggcgtgggcatggtgcaggcgtttaccctcgtgaaaaacaaagcgaaacgtgaactctttccggattttggcgaaattggcaccctctgccgcgatattttttttcgcaacaacctcattatgcgtgcgtgcggcgatcacattgtgtctgcaccgccgctcgttatgacccgtgcggaagtggatgaaatgctcgccgtggcggaacgttgcctcgaagaatttgaacagaccctcaaagcgcgtggcctcgcctaa

SEQ ID NO: 13 - DNA, 2673 bp, Artificial Sequence
  Synthetic Vector
ggcagtgagcgcaacgcaattaatgtaagttagctcactcattaggcaccccaggcttgacactttatgcttccggctcgtataatgtgtggaattgtgagcggataacaataacaatttcacacaggatctaggaaccaaggagagtggcatatgaagattggtattccaaaggaaattaaaaacaacgaaaatcgcgtagcaatgacaccagcaggagttgtatccttaacgcatgctgggcacgagaggttagctattgaaacaggaggtggtatcggttcaagttttacagatgcagagtacgtagcagcaggtgcagcatatcgttgcatcggcaaagaagcgtgggctcaagaaatgattttaaaagtaaaagaacccgtagcatcggaatacgattacttttatgagggacaaatcttatttacctacttgcacttagcgcccagagctgaattaacgcaggcattaatagataaaaaagttgtaggtattgcctatgaaacggttcaacttgcaaatggttcactacctttattaacaccaatgagtgaagtagctggtaaaatggcaacacaaattggtgcgcaatatttagagaaaaatcacggtggtaaagggattttactaggcggtgtatcaggtgtacacgcgcgtaaagtaacagtaattggtggcggaatcgcgggaacaaacgctgcgaaaattgcagttggtatgggagcagacgtaacagttattgatttaagtccagaacgtctacgtcaattagaagatatgtttggtcgcgatgttcaaacattaatgtctaacccgtataatattgcagaatctgtgaaacactcagatttagttgtcggtgctgttctaattcctggtgcaaaggctccaaagttagtttcggaagaaatgattcaatcgatgcaaccaggttctgttgttgtggatattgcgattgaccaaggtggaatttttgcgacatctgatcgtgttacaacacatgatgatccaacgtatgttaaacatggggtagtccattatgctgttgcaaatatgccaggggctgtgccacgtacttcaacgattgctttaacaaataatacaattccttatgcgttgcaaattgccaataaaggctataagcaagcatgtattgacaatcctgcattgaaaaaaggtgtgaatgcattagaggggcatattacttataaagcggtagcagaagcacaaggcttgccttatgtgaatgtggatgaattaatccaataataagctttaaggagatataatatgcagaaacagcgtaccacctctcagtggcgtgaactcgatgcggcgcatcatctccatccgtttaccgataccgcgagcctcaatcaggcgggtgcgcgtgtgatgacccgtggcgaaggcgtgtatctctgggatagcgaaggcaacaaaattattgatggcatggcgggcctctggtgcgtgaacgtgggctatggccgtaaagattttgcggaagcggcgcgtcgtcagatggaagaactcccgttttataacaccttctttaaaaccacccatccggcggtggtggaactcagcagcctcctcgccgaagttaccccggcaggttttgatcgtgtgttttataccaacagcggcagcgaaagcgtggataccatgattcgtatggtgcgtcgttattgggatgtgcagggcaaaccggaaaaaaaaaccctcattggccgttggaacggctatcacggcagcaccattggcggtgcgagcctcggcggcatgaaatatatgcatgaacagggcgatctcccgattccgggcatggcgcatattgaacagccgtggtggtataaacatggcaaagatatgaccccggatgaatttggcgtggttgcggcgcgttggctcgaagaaaaaattctcgaaatcggcgcggataaagtggcggcgtttgtgggcgaaccgattcagggtgcgggcggtgtgattgttccgccggcaacctattggccggaaattgaacgtatttgccgcaaatatgatgtgctcctcgttgcggatgaagtgatttgcggctttggccgtaccggcgaatggtttggccatcagcattttggctttcagccggacctctttaccgcggcgaaaggcctcagcagcggctatctcccgattggcgcggtgtttgtgggcaaacgtgttgcggaaggtctcattgcgggcggtgattttaaccatggctttacctatagcggccatccggtgtgtgcggcggtggcgcatgcgaatgttgcggcgctccgtgatgaaggcattgtgcagcgtgtgaaagatgatattggcccgtatatgcagaaacgttggcgtgaaacctttagccgttttgaacatgtggatgatgtgcgtggcgtgggcatggtgcaggcgtttaccctcgtgaaaaacaaagcgaaacgtgaactctttccggattttggcgaaattggcaccctctgccgcgatattttttttcgcaacaacctcattatgcgtgcgtgcggcgatcacattgtgtctgcaccgccgctcgttatgacccgtgcggaagtggatgaaatgctcgccgtggcggaacgttgcctcgaagaatttgaacagaccctcaaagcgcgtggcctcgcctaa

SEQ ID NO: 14 - DNA, 6820 bp, Artificial Sequence
  Synthetic Vector
agcgttggtactcacgcctgttatactatgagtactcacgcacagaagggggttttatggaatacgaaaaaagcgcttcagggtcggtctacctgatcaaaagtgacaagggctattggttgcccggtggctttggttatacgtcaaacaaggccgaggctggccgcttttcagtcgctgatatggccagccttaaccttgacggctgggccggccctcgagccccacttcagaagttcctatactactagagaataggaacttcactatagagtcgaataagggcgacaccccataattagcccgggcgaaaggcccagtctttcgactgagcctttcgttttatttgatgcctggcagttccctactctcgcatggggagtccccacactaccatcggcgctacggcgtttcacttctgagttcggcatggggtcaggtgggaccaccgcgctactgccgccaggcaaacaaggggtgttatgagccatattcaggtataaatgggctcgcgataatgttcagaattggttaattggttgtaacactgacccctatttgtttatttttctaaatacattcaaatatgtatccgctcatgagacaataaccctgataaatgcttcaataatattgaaaaaggaagaatatgagtattcaacatttccgtgtcgcccttattcccttttttgcggcattttgccttcctgtttttgctcacccagaaacgctggtgaaagtaaaagatgctgaagatcagttgggtgcacgagtgggttacatcgaactggatctcaacagcggtaagatccttgagagttttcgccccgaagaacgttttccaatgatgagcacttttaaagttctgctatgtggcgcggtattatcccgtattgacgccgggcaagagcaactcggtcgccgcatacactattctcagaatgacttggttgagtactcaccagtcacagaaaagcatcttacggatggcatgacagtaagagaattatgcagtgctgccataaccatgagtgataacactgcggccaacttacttctgacaacgatcggaggaccgaaggagctaaccgcttttttgcacaacatgggggatcatgtaactcgccttgatcgttgggaaccggagctgaatgaagccataccaaacgacgagcgtgacaccacgatgcctgtagcgatggcaacaacgttgcgcaaactattaactggcgaactacttactctagcttcccggcaacaattaatagactggatggaggcggataaagttgcaggaccacttctgcgctcggcccttccggctggctggtttattgctgataaatccggagccggtgagcgtggttctcgcggtatcatcgcagcgctggggccagatggtaagccctcccgtatcgtagttatctacacgacggggagtcaggcaactatggatgaacgaaatagacagatcgctgagataggtgcctcactgattaagcattggtaaaagcggcgcgccatcgaatggcgcaaaacctttcgcggtatggcatgatagcgcccggaagagagtcaattcagggtggtgaatatgaaaccagtaacgttatacgatgtcgcagagtatgccggtgtctcttatcagaccgtttcccgcgtggtgaaccaggccagccacgtttctgcgaaaacgcgggaaaaagtggaagcggcgatggcggagctgaattacattcccaaccgcgtggcacaacaactggcgggcaaacagtcgttgctgattggcgttgccacctccagtctggccctgcacgcgccgtcgcaaattgtcgcggcgattaaatctcgcgccgatcaactgggtgccagcgtggtggtgtcgatggtagaacgaagcggcgtcgaagcctgtaaagcggcggtgcacaatcttctcgcgcaacgcgtcagtgggctgatcattaactatccgctggatgaccaggatgccattgctgtggaagctgcctgcactaatgttccggcgttatttcttgatgtctctgaccagacacccatcaacagtattattttctcccatgaggacggtacgcgactgggcgtggagcatctggtcgcattgggtcaccagcaaatcgcgctgttagcgggcccattaagttctgtctcggcgcgtctgcgtctggctggctggcataaatatctcactcgcaatcaaattcagccgatagcggaacgggaaggcgactggagtgccatgtccggttttcaacaaaccatgcaaatgctgaatgagggcatcgttcccactgcgatgctggttgccaacgatcagatggcgctgggcgcaatgcgcgccattaccgagtccgggctgcgcgttggtgcggatatctcggtagtgggatacgacgataccgaagatagctcatgttatatcccgccgttaaccaccatcaaacaggattttcgcctgctggggcaaaccagcgtggaccgcttgctgcaactctctcagggccaggcggtgaagggcaatcagctgttgccagtctcactggtgaaaagaaaaaccaccctggcgcccaatacgcaaaccgcctctccccgcgcgttggccgattcattaatgcagctggcacgacaggtttcccgactggaaagcgggcagtgattaataagatgatcttcttgagatcgttttggtctgcgcgtaatctcttgctctgaaaacgaaaaaaccgccttgcagggcggtttttcgaaggttctctgagctaccaactctttgaaccgaggtaactggcttggaggagcgcagtcaccaaaacttgtcctttcagtttagccttaaccggcgcatgacttcaagactaactcctctaaatcaattaccagtggctgctgccagtggtgcttttgcatgtctttccgggttggactcaagacgatagttaccggataaggcgcagcggtcggactgaacggggggttcgtgcatacagtccagcttggagcgaactgcctacccggaactgagtgtcaggcgtggaatgagacaaacgcggccataacagcggaatgacaccggtaaaccgaaaggcaggaacaggagagcgcacgagggagccgccagggggaaacgcctggtatctttatagtcctgtcgggtttcgccaccactgatttgagcgtcagatttcgtgatgcttgtcaggggggcggagcctatggaaaaacggctttgccgcggccctctcacttccctgttaagtatcttcctggcatcttccaggaaatctccgccccgttcgtaagccatttccgctcgccgcagtcgaacgaccgagcgtagcgagtcagtgagcgaggaagcggaatatatcctgtatcacatattctgctgacgcaccggtgcagccttttttctcctgccacatgaagcacttcactgacaccctcatcagtgccaacatagtaagccagtatacactccgctagcgctgaggtcccgcagccgaacgaccgagcgcagcggcgagagtagggaactgccaggcatcctgggcggttctgataacgagtaatcgttaatccgcaaataacgtaaaaacccgcttcggcgggtttttttatggggggagtttagggaaagagcatttgtcagaatatttaagggcgcctgtcactttgcttgatatatgagaattatttaaccttataaatgagaaaaaagcaacgcactttaaataagatacgttgctttttcgattgatgaacacctataattaaactattcatctattatttatgattttttgtatatacaatatttctagtttgttaaagagaattaagaaaataaatctcgaaaataataaagggaaaatcagtttttgatatcaaaattatacatgtcaacgataatacaaaatataatacaaactataagatgttatcagtatttattatgcatttagaataccttttgtgtcgcccttattcgactccctatagaagttcctattctctagtaagtataggaacttcccttcattttctcgaggcggccgcggatcctgcagccccgcagggcctgtctcggtcgatcattcagcccggctcatagatatgcgggcagtgagcgcaacgcaattaatgtaagttagctcactcattaggcaccccaggcttgacactttatgcttccggctcgtataatgtgtggaattgtgagcggataacaataacaatttcacacaggatctaggaaccaaggagagtggcatatgaagattggtattccaaaggaaattaaaaacaacgaaaatcgcgtagcaatgacaccagcaggagttgtatccttaacgcatgctgggcacgagaggttagctattgaaacaggaggtggtatcggttcaagttttacagatgcagagtacgtagcagcaggtgcagcatatcgttgcatcggcaaagaagcgtgggctcaagaaatgattttaaaagtaaaagaacccgtagcatcggaatacgattacttttatgagggacaaatcttatttacctacttgcacttagcgcccagagctgaattaacgcaggcattaatagataaaaaagttgtaggtattgcctatgaaacggttcaacttgcaaatggttcactacctttattaacaccaatgagtgaagtagctggtaaaatggcaacacaaattggtgcgcaatatttagagaaaaatcacggtggtaaagggattttactaggcggtgtatcaggtgtacacgcgcgtaaagtaacagtaattggtggcggaatcgcgggaacaaacgctgcgaaaattgcagttggtatgggagcagacgtaacagttattgatttaagtccagaacgtctacgtcaattagaagatatgtttggtcgcgatgttcaaacattaatgtctaacccgtataatattgcagaatctgtgaaacactcagatttagttgtcggtgctgttctaattcctggtgcaaaggctccaaagttagtttcggaagaaatgattcaatcgatgcaaccaggttctgttgttgtggatattgcgattgaccaaggtggaatttttgcgacatctgatcgtgttacaacacatgatgatccaacgtatgttaaacatggggtagtccattatgctgttgcaaatatgccaggggctgtgccacgtacttcaacgattgctttaacaaataatacaattccttatgcgttgcaaattgccaataaaggctataagcaagcatgtattgacaatcctgcattgaaaaaaggtgtgaatgcattagaggggcatattacttataaagcggtagcagaagcacaaggcttgccttatgtgaatgtggatgaattaatccaataataagctttaaggagatataatatgcagaaacagcgtaccacctctcagtggcgtgaactcgatgcggcgcatcatctccatccgtttaccgataccgcgagcctcaatcaggcgggtgcgcgtgtgatgacccgtggcgaaggcgtgtatctctgggatagcgaaggcaacaaaattattgatggcatggcgggcctctggtgcgtgaacgtgggctatggccgtaaagattttgcggaagcggcgcgtcgtcagatggaagaactcccgttttataacaccttctttaaaaccacccatccggcggtggtggaactcagcagcctcctcgccgaagttaccccggcaggttttgatcgtgtgttttataccaacagcggcagcgaaagcgtggataccatgattcgtatggtgcgtcgttattgggatgtgcagggcaaaccggaaaaaaaaaccctcattggccgttggaacggctatcacggcagcaccattggcggtgcgagcctcggcggcatgaaatatatgcatgaacagggcgatctcccgattccgggcatggcgcatattgaacagccgtggtggtataaacatggcaaagatatgaccccggatgaatttggcgtggttgcggcgcgttggctcgaagaaaaaattctcgaaatcggcgcggataaagtggcggcgtttgtgggcgaaccgattcagggtgcgggcggtgtgattgttccgccggcaacctattggccggaaattgaacgtatttgccgcaaatatgatgtgctcctcgttgcggatgaagtgatttgcggctttggccgtaccggcgaatggtttggccatcagcattttggctttcagccggacctctttaccgcggcgaaaggcctcagcagcggctatctcccgattggcgcggtgtttgtgggcaaacgtgttgcggaaggtctcattgcgggcggtgattttaaccatggctttacctatagcggccatccggtgtgtgcggcggtggcgcatgcgaatgttgcggcgctccgtgatgaaggcattgtgcagcgtgtgaaagatgatattggcccgtatatgcagaaacgttggcgtgaaacctttagccgttttgaacatgtggatgatgtgcgtggcgtgggcatggtgcaggcgtttaccctcgtgaaaaacaaagcgaaacgtgaactctttccggattttggcgaaattggcaccctctgccgcgatattttttttcgcaacaacctcattatgcgtgcgtgcggcgatcacattgtgtctgcaccgccgctcgttatgacccgtgcggaagtggatgaaatgctcgccgtggcggaacgttgcctcgaagaatttgaacagaccctcaaagcgcgtggcctcgcctaataatctag

SEQ ID NO: 15 - DNA, 24 bp, Artificial Sequence
  Synthetic Primer
atgatcataggggttcctaaagag

SEQ ID NO: 16 - DNA, 20 bp, Artificial Sequence
  Synthetic Primer
ttaagcacccgccacagatg

SEQ ID NO: 17 - DNA, 6837 bp, Artificial Sequence
  Synthetic Vector
agcgttggtactcacgcctgttatactatgagtactcacgcacagaagggggttttatggaatacgaaaaaagcgcttcagggtcggtctacctgatcaaaagtgacaagggctattggttgcccggtggctttggttatacgtcaaacaaggccgaggctggccgcttttcagtcgctgatatggccagccttaaccttgacggctgggccggccctcgagccccacttcagaagttcctatactactagagaataggaacttcactatagagtcgaataagggcgacaccccataattagcccgggcgaaaggcccagtctttcgactgagcctttcgttttatttgatgcctggcagttccctactctcgcatggggagtccccacactaccatcggcgctacggcgtttcacttctgagttcggcatggggtcaggtgggaccaccgcgctactgccgccaggcaaacaaggggtgttatgagccatattcaggtataaatgggctcgcgataatgttcagaattggttaattggttgtaacactgacccctatttgtttatttttctaaatacattcaaatatgtatccgctcatgagacaataaccctgataaatgcttcaataatattgaaaaaggaagaatatgagtattcaacatttccgtgtcgcccttattcccttttttgcggcattttgccttcctgtttttgctcacccagaaacgctggtgaaagtaaaagatgctgaagatcagttgggtgcacgagtgggttacatcgaactggatctcaacagcggtaagatccttgagagttttcgccccgaagaacgttttccaatgatgagcacttttaaagttctgctatgtggcgcggtattatcccgtattgacgccgggcaagagcaactcggtcgccgcatacactattctcagaatgacttggttgagtactcaccagtcacagaaaagcatcttacggatggcatgacagtaagagaattatgcagtgctgccataaccatgagtgataacactgcggccaacttacttctgacaacgatcggaggaccgaaggagctaaccgcttttttgcacaacatgggggatcatgtaactcgccttgatcgttgggaaccggagctgaatgaagccataccaaacgacgagcgtgacaccacgatgcctgtagcgatggcaacaacgttgcgcaaactattaactggcgaactacttactctagcttcccggcaacaattaatagactggatggaggcggataaagttgcaggaccacttctgcgctcggcccttccggctggctggtttattgctgataaatccggagccggtgagcgtggttctcgcggtatcatcgcagcgctggggccagatggtaagccctcccgtatcgtagttatctacacgacggggagtcaggcaactatggatgaacgaaatagacagatcgctgagataggtgcctcactgattaagcattggtaaaagcggcgcgccatcgaatggcgcaaaacctttcgcggtatggcatgatagcgcccggaagagagtcaattcagggtggtgaatatgaaaccagtaacgttatacgatgtcgcagagtatgccggtgtctcttatcagaccgtttcccgcgtggtgaaccaggccagccacgtttctgcgaaaacgcgggaaaaagtggaagcggcgatggcggagctgaattacattcccaaccgcgtggcacaacaactggcgggcaaacagtcgttgctgattggcgttgccacctccagtctggccctgcacgcgccgtcgcaaattgtcgcggcgattaaatctcgcgccgatcaactgggtgccagcgtggtggtgtcgatggtagaacgaagcggcgtcgaagcctgtaaagcggcggtgcacaatcttctcgcgcaacgcgtcagtgggctgatcattaactatccgctggatgaccaggatgccattgctgtggaagctgcctgcactaatgttccggcgttatttcttgatgtctctgaccagacacccatcaacagtattattttctcccatgaggacggtacgcgactgggcgtggagcatctggtcgcattgggtcaccagcaaatcgcgctgttagcgggcccattaagttctgtctcggcgcgtctgcgtctggctggctggcataaatatctcactcgcaatcaaattcagccgatagcggaacgggaaggcgactggagtgccatgtccggttttcaacaaaccatgcaaatgctgaatgagggcatcgttcccactgcgatgctggttgccaacgatcagatggcgctgggcgcaatgcgcgccattaccgagtccgggctgcgcgttggtgcggatatctcggtagtgggatacgacgataccgaagatagctcatgttatatcccgccgttaaccaccatcaaacaggattttcgcctgctggggcaaaccagcgtggaccgcttgctgcaactctctcagggccaggcggtgaagggcaatcagctgttgccagtctcactggtgaaaagaaaaaccaccctggcgcccaatacgcaaaccgcctctccccgcgcgttggccgattcattaatgcagctggcacgacaggtttcccgactggaaagcgggcagtgattaataagatgatcttcttgagatcgttttggtctgcgcgtaatctcttgctctgaaaacgaaaaaaccgccttgcagggcggtttttcgaaggttctctgagctaccaactctttgaaccgaggtaactggcttggaggagcgcagtcaccaaaacttgtcctttcagtttagccttaaccggcgcatgacttcaagactaactcctctaaatcaattaccagtggctgctgccagtggtgcttttgcatgtctttccgggttggactcaagacgatagttaccggataaggcgcagcggtcggactgaacggggggttcgtgcatacagtccagcttggagcgaactgcctacccggaactgagtgtcaggcgtggaatgagacaaacgcggccataacagcggaatgacaccggtaaaccgaaaggcaggaacaggagagcgcacgagggagccgccagggggaaacgcctggtatctttatagtcctgtcgggtttcgccaccactgatttgagcgtcagatttcgtgatgcttgtcaggggggcggagcctatggaaaaacggctttgccgcggccctctcacttccctgttaagtatcttcctggcatcttccaggaaatctccgccccgttcgtaagccatttccgctcgccgcagtcgaacgaccgagcgtagcgagtcagtgagcgaggaagcggaatatatcctgtatcacatattctgctgacgcaccggtgcagccttttttctcctgccacatgaagcacttcactgacaccctcatcagtgccaacatagtaagccagtatacactccgctagcgctgaggtcccgcagccgaacgaccgagcgcagcggcgagagtagggaactgccaggcatcctgggcggttctgataacgagtaatcgttaatccgcaaataacgtaaaaacccgcttcggcgggtttttttatggggggagtttagggaaagagcatttgtcagaatatttaagggcgcctgtcactttgcttgatatatgagaattatttaaccttataaatgagaaaaaagcaacgcactttaaataagatacgttgctttttcgattgatgaacacctataattaaactattcatctattatttatgattttttgtatatacaatatttctagtttgttaaagagaattaagaaaataaatctcgaaaataataaagggaaaatcagtttttgatatcaaaattatacatgtcaacgataatacaaaatataatacaaactataagatgttatcagtatttattatgcatttagaataccttttgtgtcgcccttattcgactccctatagaagttcctattctctagtaagtataggaacttcccttcattttctcgaggcggccgcggatcctgcagccccgcagggcctgtctcggtcgatcattcagcccggctcatagatatgcgggcagtgagcgcaacgcaattaatgtaagttagctcactcattaggcaccccaggcttgacactttatgcttccggctcgtataatgtgtggaattgtgagcggataacaataacaatttcacacaggatctaggaaccaaggagagtggcataatgatcataggggttcctaaagagataaaaaacaatgaaaaccgtgtcgcattaacacccgggggcgtttctcagctcatttcaaacggccaccgggtgctggttgaaacaggcgcgggccttggaagcggatttgaaaatgaagcctatgagtcagcaggagcggaaatcattgctgatccgaagcaggtctgggacgccgaaatggtcatgaaagtaaaagaaccgctgccggaagaatatgtttattttcgcaaaggacttgtgctgtttacgtaccttcatttagcagctgagcctgagcttgcacaggccttgaaggataaaggagtaactgccatcgcatatgaaacggtcagtgaaggccggacattgcctcttctgacgccaatgtcagaggttgcgggcagaatggcagcgcaaatcggcgctcaattcttagaaaagcctaaaggcggaaaaggcattctgcttgccggggtgcctggcgtttcccgcggaaaagtaacaattatcggaggaggcgttgtcgggacaaacgcggcgaaaatggctgtcggcctcggtgcagatgtgacgatcattgacttaaacgcagaccgcttgcgccagcttgatgacatcttcggccatcagattaaaacgttaatttctaatccggtcaatattgctgatgctgtggcggaagcggatctcctcatttgcgcggtattaattccgggtgctaaagctccgactcttgtcactgaggaaatggtaaaacaaatgaaacccggttcagttattgttgatgtagcgatcgaccaaggcggcatcgtcgaaactgtcgaccatatcacaacacatgatcagccaacatatgaaaaacacggggttgtgcattatgctgtagcgaacatgccaggcgcagtccctcgtacatcaacaatcgccctgactaacgttactgttccatacgcgctgcaaatcgcgaacaaaggggcagtaaaagcgctcgcagacaatacggcactgagagcgggtttaaacaccgcaaacggacacgtgacctatgaagctgtagcaagagatctaggctatgagtatgttcctgccgagaaagctttacaggatgaatcatctgtggcgggtgcttaaagctttaaggagatataatatgcagaaacagcgtaccacctctcagtggcgtgaactcgatgcggcgcatcatctccatccgtttaccgataccgcgagcctcaatcaggcgggtgcgcgtgtgatgacccgtggcgaaggcgtgtatctctgggatagcgaaggcaacaaaattattgatggcatggcgggcctctggtgcgtgaacgtgggctatggccgtaaagattttgcggaagcggcgcgtcgtcagatggaagaactcccgttttataacaccttctttaaaaccacccatccggcggtggtggaactcagcagcctcctcgccgaagttaccccggcaggttttgatcgtgtgttttataccaacagcggcagcgaaagcgtggataccatgattcgtatggtgcgtcgttattgggatgtgcagggcaaaccggaaaaaaaaaccctcattggccgttggaacggctatcacggcagcaccattggcggtgcgagcctcggcggcatgaaatatatgcatgaacagggcgatctcccgattccgggcatggcgcatattgaacagccgtggtggtataaacatggcaaagatatgaccccggatgaatttggcgtggttgcggcgcgttggctcgaagaaaaaattctcgaaatcggcgcggataaagtggcggcgtttgtgggcgaaccgattcagggtgcgggcggtgtgattgttccgccggcaacctattggccggaaattgaacgtatttgccgcaaatatgatgtgctcctcgttgcggatgaagtgatttgcggctttggccgtaccggcgaatggtttggccatcagcattttggctttcagccggacctctttaccgcggcgaaaggcctcagcagcggctatctcccgattggcgcggtgtttgtgggcaaacgtgttgcggaaggtctcattgcgggcggtgattttaaccatggctttacctatagcggccatccggtgtgtgcggcggtggcgcatgcgaatgttgcggcgctccgtgatgaaggcattgtgcagcgtgtgaaagatgatattggcccgtatatgcagaaacgttggcgtgaaacctttagccgttttgaacatgtggatgatgtgcgtggcgtgggcatggtgcaggcgtttaccctcgtgaaaaacaaagcgaaacgtgaactctttccggattttggcgaaattggcaccctctgccgcgatattttttttcgcaacaacctcattatgcgtgcgtgcggcgatcacattgtgtctgcaccgccgctcgttatgacccgtgcggaagtggatgaaatgctcgccgtggcggaacgttgcctcgaagaatttgaacagaccctcaaagcgcgtggcctcgcctaataatctag

SEQ ID NO: 18 - DNA, 1065 bp, Artificial Sequence
  Synthetic Expression Construct
aacaattacgagcttcatgcacagtgatcgacgctgttgacaattaatcatcggctcgtataatgtgtggatgtggaattgtgagcgctcacaattccacaacggtttccctctagaaataattttgtttaacaggaggtaaaacatatgctggaccgcaaatccaaacgccctgacatgctggtcgaacctctgggtgttgatcgtatcgtctacgatggtgttagctttcgtcagagcttcagcattcgcagctacgagatcggcgctgatcgcactgcgtctattgaaaccctgatgaacatgtttcaggaaacgtcgctgaatcactgcaaaatcattggcctgttgaacgatggcttcggccgtaccccggagatgtgtaagcgtgacctgatctgggtcgtcacgaagatgcagattgaagtgaatcgttatccgacctggggtgataccatcgaggtgaatacgtgggtgtccgccagcggtaagcacggtatgggccgtgactggctgatttctgactgtcataccggtgagatcctgattcgtgcgaccagcgtgtgggccatgatgaaccagaaaactcgtcgcctgagcaaaatcccgtacgaagtgcgtcaggagatcgagccgcaattcgtggacagcgcaccggttattgttgacgatcgcaaattccataaactggatctgaaaaccggcgacagcatttgcaacggtctgacgccgcgttggacggatctggacgtcaaccaacacgtcaataatgtgaagtacattggttggatcttgcagagcgttccgaccgaagtgtttgaaacgcaagagctgtgcggcttgaccctggagtatcgtcgcgagtgtggtcgtgactccgttttggagtctgttaccgcaatggacccaagcaaggaaggtgatcgtagcctgtatcaacacctgctgcgcctggaggacggtgcggatattgttaagggccgtaccgaatggcgtccgaagaacgcgggtgcgaaaggtgcaatcctgacgggtaagaccagcaacggcaatagcatcagctaa

SEQ ID NO: 19 - DNA, 7966 bp, Artificial Sequence
  Synthetic Vector
ctagattattaggcgaggccacgcgctttgagggtctgttcaaattcttcgaggcaacgttccgccacggcgagcatttcatccacttccgcacgggtcataacgagcggcggtgcagacacaatgtgatcgccgcacgcacgcataatgaggttgttgcgaaaaaaaatatcgcggcagagggtgccaatttcgccaaaatccggaaagagttcacgtttcgctttgtttttcacgagggtaaacgcctgcaccatgcccacgccacgcacatcatccacatgttcaaaacggctaaaggtttcacgccaacgtttctgcatatacgggccaatatcatctttcacacgctgcacaatgccttcatcacggagcgccgcaacattcgcatgcgccaccgccgcacacaccggatggccgctataggtaaagccatggttaaaatcaccgcccgcaatgagaccttccgcaacacgtttgcccacaaacaccgcgccaatcgggagatagccgctgctgaggcctttcgccgcggtaaagaggtccggctgaaagccaaaatgctgatggccaaaccattcgccggtacggccaaagccgcaaatcacttcatccgcaacgaggagcacatcatatttgcggcaaatacgttcaatttccggccaataggttgccggcggaacaatcacaccgcccgcaccctgaatcggttcgcccacaaacgccgccactttatccgcgccgatttcgagaattttttcttcgagccaacgcgccgcaaccacgccaaattcatccggggtcatatctttgccatgtttataccaccacggctgttcaatatgcgccatgcccggaatcgggagatcgccctgttcatgcatatatttcatgccgccgaggctcgcaccgccaatggtgctgccgtgatagccgttccaacggccaatgagggtttttttttccggtttgccctgcacatcccaataacgacgcaccatacgaatcatggtatccacgctttcgctgccgctgttggtataaaacacacgatcaaaacctgccggggtaacttcggcgaggaggctgctgagttccaccaccgccggatgggtggttttaaagaaggtgttataaaacgggagttcttccatctgacgacgcgccgcttccgcaaaatctttacggccatagcccacgttcacgcaccagaggcccgccatgccatcaataattttgttgccttcgctatcccagagatacacgccttcgccacgggtcatcacacgcgcacccgcctgattgaggctcgcggtatcggtaaacggatggagatgatgcgccgcatcgagttcacgccactgagaggtggtacgctgtttctgcatattatatctccttaaagctttaagcacccgccacagatgattcatcctgtaaagctttctcggcaggaacatactcatagcctagatctcttgctacagcttcataggtcacgtgtccgtttgcggtgtttaaacccgctctcagtgccgtattgtctgcgagcgcttttactgcccctttgttcgcgatttgcagcgcgtatggaacagtaacgttagtcagggcgattgttgatgtacgagggactgcgcctggcatgttcgctacagcataatgcacaaccccgtgtttttcatatgttggctgatcatgtgttgtgatatggtcgacagtttcgacgatgccgccttggtcgatcgctacatcaacaataactgaaccgggtttcatttgttttaccatttcctcagtgacaagagtcggagctttagcacccggaattaataccgcgcaaatgaggagatccgcttccgccacagcatcagcaatattgaccggattagaaattaacgttttaatctgatggccgaagatgtcatcaagctggcgcaagcggtctgcgtttaagtcaatgatcgtcacatctgcaccgaggccgacagccattttcgccgcgtttgtcccgacaacgcctcctccgataattgttacttttccgcgggaaacgccaggcaccccggcaagcagaatgccttttccgcctttaggcttttctaagaattgagcgccgatttgcgctgccattctgcccgcaacctctgacattggcgtcagaagaggcaatgtccggccttcactgaccgtttcatatgcgatggcagttactcctttatccttcaaggcctgtgcaagctcaggctcagctgctaaatgaaggtacgtaaacagcacaagtcctttgcgaaaataaacatattcttccggcagcggttcttttactttcatgaccatttcggcgtcccagacctgcttcggatcagcaatgatttccgctcctgctgactcataggcttcattttcaaatccgcttccaaggcccgcgcctgtttcaaccagcacccggtggccgtttgaaatgagctgagaaacgcccccgggtgttaatgcgacacggttttcattgttttttatctctttaggaacccctatgatcattatgccactctccttggttcctagatcctgtgtgaaattgttattgttatccgctcacaattccacacattatacgagccggaagcataaagtgtcaagcctggggtgcctaatgagtgagctaacttacattaattgcgttgcgctcactgcccgcatatctatgagccgggctgaatgatcgaccgagacaggccctgcggggctgcaggatccaattgtgagcggataacaattacgagcttcatgcacagtgatcgacgctgttgacaattaatcatcggctcgtataatgtgtggatgtggaattgtgagcgctcacaattccacaacggtttccctctagaaataattttgtttaacaggaggtaaaacatatgctggaccgcaaatccaaacgccctgacatgctggtcgaacctctgggtgttgatcgtatcgtctacgatggtgttagctttcgtcagagcttcagcattcgcagctacgagatcggcgctgatcgcactgcgtctattgaaaccctgatgaacatgtttcaggaaacgtcgctgaatcactgcaaaatcattggcctgttgaacgatggcttcggccgtaccccggagatgtgtaagcgtgacctgatctgggtcgtcacgaagatgcagattgaagtgaatcgttatccgacctggggtgataccatcgaggtgaatacgtgggtgtccgccagcggtaagcacggtatgggccgtgactggctgatttctgactgtcataccggtgagatcctgattcgtgcgaccagcgtgtgggccatgatgaaccagaaaactcgtcgcctgagcaaaatcccgtacgaagtgcgtcaggagatcgagccgcaattcgtggacagcgcaccggttattgttgacgatcgcaaattccataaactggatctgaaaaccggcgacagcatttgcaacggtctgacgccgcgttggacggatctggacgtcaaccaacacgtcaataatgtgaagtacattggttggatcttgcagagcgttccgaccgaagtgtttgaaacgcaagagctgtgcggcttgaccctggagtatcgtcgcgagtgtggtcgtgactccgttttggagtctgttaccgcaatggacccaagcaaggaaggtgatcgtagcctgtatcaacacctgctgcgcctggaggacggtgcggatattgttaagggccgtaccgaatggcgtccgaagaacgcgggtgcgaaaggtgcaatcctgacgggtaagaccagcaacggcaatagcatcagctaatagtcaaaagcctccggtcggaggcttttgactttctgcttactgaatttgcggccgcctcgagaaaatgaagggaagttcctatacttactagagaataggaacttctatagggagtcgaataagggcgacacaaaaggtattctaaatgcataataaatactgataacatcttatagtttgtattatattttgtattatcgttgacatgtataattttgatatcaaaaactgattttccctttattattttcgagatttattttcttaattctctttaacaaactagaaatattgtatatacaaaaaatcataaataatagatgaatagtttaattataggtgttcatcaatcgaaaaagcaacgtatcttatttaaagtgcgttgcttttttctcatttataaggttaaataattctcatatatcaagcaaagtgacaggcgcccttaaatattctgacaaatgctctttccctaaactccccccataaaaaaacccgccgaagcgggtttttacgttatttgcggattaacgattactcgttatcagaaccgcccaggatgcctggcagttccctactctcgccgctgcgctcggtcgttcggctgcgggacctcagcgctagcggagtgtatactggcttactatgttggcactgatgagggtgtcagtgaagtgcttcatgtggcaggagaaaaaaggctgcaccggtgcgtcagcagaatatgtgatacaggatatattccgcttcctcgctcactgactcgctacgctcggtcgttcgactgcggcgagcggaaatggcttacgaacggggcggagatttcctggaagatgccaggaagatacttaacagggaagtgagagggccgcggcaaagccgtttttccataggctccgcccccctgacaagcatcacgaaatctgacgctcaaatcagtggtggcgaaacccgacaggactataaagataccaggcgtttccccctggcggctccctcgtgcgctctcctgttcctgcctttcggtttaccggtgtcattccgctgttatggccgcgtttgtctcattccacgcctgacactcagttccgggtaggcagttcgctccaagctggactgtatgcacgaaccccccgttcagtccgaccgctgcgccttatccggtaactatcgtcttgagtccaacccggaaagacatgcaaaagcaccactggcagcagccactggtaattgatttagaggagttagtcttgaagtcatgcgccggttaaggctaaactgaaaggacaagttttggtgactgcgctcctccaagccagttacctcggttcaaagagttggtagctcagagaaccttcgaaaaaccgccctgcaaggcggttttttcgttttcagagcaagagattacgcgcagaccaaaacgatctcaagaagatcatcttattaatcactgcccgctttccagtcgggaaacctgtcgtgccagctgcattaatgaatcggccaacgcgcggggagaggcggtttgcgtattgggcgccagggtggtttttcttttcaccagtgagactggcaacagctgattgcccttcaccgcctggccctgagagagttgcagcaagcggtccacgctggtttgccccagcaggcgaaaatcctgtttgatggtggttaacggcgggatataacatgagctatcttcggtatcgtcgtatcccactaccgagatatccgcaccaacgcgcagcccggactcggtaatggcgcgcattgcgcccagcgccatctgatcgttggcaaccagcatcgcagtgggaacgatgccctcattcagcatttgcatggtttgttgaaaaccggacatggcactccagtcgccttcccgttccgctatcggctgaatttgattgcgagtgagatatttatgccagccagccagacgcagacgcgccgagacagaacttaatgggcccgctaacagcgcgatttgctggtgacccaatgcgaccagatgctccacgcccagtcgcgtaccgtcctcatgggagaaaataatactgttgatgggtgtctggtcagagacatcaagaaataacgccggaacattagtgcaggcagcttccacagcaatggcatcctggtcatccagcggatagttaatgatcagcccactgacgcgttgcgcgagaagattgtgcaccgccgctttacaggcttcgacgccgcttcgttctaccatcgacaccaccacgctggcacccagttgatcggcgcgagatttaatcgccgcgacaatttgcgacggcgcgtgcagggccagactggaggtggcaacgccaatcagcaacgactgtttgcccgccagttgttgtgccacgcggttgggaatgtaattcagctccgccatcgccgcttccactttttcccgcgttttcgcagaaacgtggctggcctggttcaccacgcgggaaacggtctgataagagacaccggcatactctgcgacatcgtataacgttactggtttcatattcaccaccctgaattgactctcttccgggcgctatcatgccataccgcgaaaggttttgcgccattcgatggcgcgccgcttttaccaatgcttaatcagtgaggcacctatctcagcgatctgtctatttcgttcatccatagttgcctgactccccgtcgtgtagataactacgatacgggagggcttaccatctggccccagcgctgcgatgataccgcgagaaccacgctcaccggctccggatttatcagcaataaaccagccagccggaagggccgagcgcagaagtggtcctgcaactttatccgcctccatccagtctattaattgttgccgggaagctagagtaagtagttcgccagttaatagtttgcgcaacgttgttgccatcgctacaggcatcgtggtgtcacgctcgtcgtttggtatggcttcattcagctccggttcccaacgatcaaggcgagttacatgatcccccatgttgtgcaaaaaagcggttagctccttcggtcctccgatcgttgtcagaagtaagttggccgcagtgttatcactcatggttatggcagcactgcataattctcttactgtcatgccatccgtaagatgcttttctgtgactggtgagtactcaaccaagtcattctgagaatagtgtatgcggcgaccgagttgctcttgcccggcgtcaatacgggataataccgcgccacatagcagaactttaaaagtgctcatcattggaaaacgttcttcggggcgaaaactctcaaggatcttaccgctgttgagatccagttcgatgtaacccactcgtgcacccaactgatcttcagcatcttttactttcaccagcgtttctgggtgagcaaaaacaggaaggcaaaatgccgcaaaaaagggaataagggcgacacggaaatgttgaatactcatattcttcctttttcaatattattgaagcatttatcagggttattgtctcatgagcggatacatatttgaatgtatttagaaaaataaacaaataggggtcagtgttacaaccaattaaccaattctgaacattatcgcgagcccatttatacctgaatatggctcataacaccccttgtttgcctggcggcagtagcgcggtggtcccacctgaccccatgccgaactcagaagtgaaacgccgtagcgccgatggtagtgtggggactccccatgcgagagtagggaactgccaggcatcaaataaaacgaaaggctcagtcgaaagactgggcctttcgcccgggctaattatggggtgtcgcccttattcgactctatagtgaagttcctattctctagtagtataggaacttctgaagtggggctcgagggccggcccagccgtcaaggttaaggctggccatatcagcgactgaaaagcggccagcctcggccttgtttgacgtataaccaaagccaccgggcaaccaatagcccttgtcacttttgatcaggtagaccgaccctgaagcgcttttttcgtattccataaaacccccttctgtgcgtgagtactcatagtataacaggcgtgagtaccaacgct

SEQ ID NO: 20 - DNA, 4985 bp, Artificial Sequence
  Synthetic Vector
aaaagcggcgcgccatcgaatggcgcaaaacctttcgcggtatggcatgatagcgcccggaagagagtcaattcagggtggtgaatatgaaaccagtaacgttatacgatgtcgcagagtatgccggtgtctcttatcagaccgtttcccgcgtggtgaaccaggccagccacgtttctgcgaaaacgcgggaaaaagtggaagcggcgatggcggagctgaattacattcccaaccgcgtggcacaacaactggcgggcaaacagtcgttgctgattggcgttgccacctccagtctggccctgcacgcgccgtcgcaaattgtcgcggcgattaaatctcgcgccgatcaactgggtgccagcgtggtggtgtcgatggtagaacgaagcggcgtcgaagcctgtaaagcggcggtgcacaatcttctcgcgcaacgcgtcagtgggctgatcattaactatccgctggatgaccaggatgccattgctgtggaagctgcctgcactaatgttccggcgttatttcttgatgtctctgaccagacacccatcaacagtattattttctcccatgaggacggtacgcgactgggcgtggagcatctggtcgcattgggtcaccagcaaatcgcgctgttagcgggcccattaagttctgtctcggcgcgtctgcgtctggctggctggcataaatatctcactcgcaatcaaattcagccgatagcggaacgggaaggcgactggagtgccatgtccggttttcaacaaaccatgcaaatgctgaatgagggcatcgttcccactgcgatgctggttgccaacgatcagatggcgctgggcgcaatgcgcgccattaccgagtccgggctgcgcgttggtgcggatatctcggtagtgggatacgacgataccgaagatagctcatgttatatcccgccgttaaccaccatcaaacaggattttcgcctgctggggcaaaccagcgtggaccgcttgctgcaactctctcagggccaggcggtgaagggcaatcagctgttgccagtctcactggtgaaaagaaaaaccaccctggcgcccaatacgcaaaccgcctctccccgcgcgttggccgattcattaatgcagctggcacgacaggtttcccgactggaaagcgggcagtgattaataagatgatcttcttgagatcgttttggtctgcgcgtaatctcttgctctgaaaacgaaaaaaccgccttgcagggcggtttttcgaaggttctctgagctaccaactctttgaaccgaggtaactggcttggaggagcgcagtcaccaaaacttgtcctttcagtttagccttaaccggcgcatgacttcaagactaactcctctaaatcaattaccagtggctgctgccagtggtgcttttgcatgtctttccgggttggactcaagacgatagttaccggataaggcgcagcggtcggactgaacggggggttcgtgcatacagtccagcttggagcgaactgcctacccggaactgagtgtcaggcgtggaatgagacaaacgcggccataacagcggaatgacaccggtaaaccgaaaggcaggaacaggagagcgcacgagggagccgccagggggaaacgcctggtatctttatagtcctgtcgggtttcgccaccactgatttgagcgtcagatttcgtgatgcttgtcaggggggcggagcctatggaaaaacggctttgccgcggccctctcacttccctgttaagtatcttcctggcatcttccaggaaatctccgccccgttcgtaagccatttccgctcgccgcagtcgaacgaccgagcgtagcgagtcagtgagcgaggaagcggaatatatcctgtatcacatattctgctgacgcaccggtgcagccttttttctcctgccacatgaagcacttcactgacaccctcatcagtgccaacatagtaagccagtatacactccgctagcgctgaggtcccgcagccgaacgaccgagcgcagcggcgagagtagggaactgccaggcatcctgggcggttctgataacgagtaatcgttaatccgcaaataacgtaaaaacccgcttcggcgggtttttttatggggggagtttagggaaagagcatttgtcagaatatttaagggcgcctgtcactttgcttgatatatgagaattatttaaccttataaatgagaaaaaagcaacgcactttaaataagatacgttgctttttcgattgatgaacacctataattaaactattcatctattatttatgattttttgtatatacaatatttctagtttgttaaagagaattaagaaaataaatctcgaaaataataaagggaaaatcagtttttgatatcaaaattatacatgtcaacgataatacaaaatataatacaaactataagatgttatcagtatttattatgcatttagaataccttttgtgtcgcccttattcgactccctatagaagttcctattctctagaaagtataggaacttcccttcattttggatccaattgtgagcggataacaattacgagcttcatgcacagtgatcgacgctgttgacaattaatcatcggctcgtataatgtgtggatgtggaattgtgagcgctcacaattccacaacggtttccctctagaaataattttgtttaacaggaggtaaaacatatgctggaccgcaaatccaaacgccctgacatgctggtcgaacctctgggtgttgatcgtatcgtctacgatggtgttagctttcgtcagagcttcagcattcgcagctacgagatcggcgctgatcgcactgcgtctattgaaaccctgatgaacatgtttcaggaaacgtcgctgaatcactgcaaaatcattggcctgttgaacgatggcttcggccgtaccccggagatgtgtaagcgtgacctgatctgggtcgtcacgaagatgcagattgaagtgaatcgttatccgacctggggtgataccatcgaggtgaatacgtgggtgtccgccagcggtaagcacggtatgggccgtgactggctgatttctgactgtcataccggtgagatcctgattcgtgcgaccagcgtgtgggccatgatgaaccagaaaactcgtcgcctgagcaaaatcccgtacgaagtgcgtcaggagatcgagccgcaattcgtggacagcgcaccggttattgttgacgatcgcaaattccataaactggatctgaaaaccggcgacagcatttgcaacggtctgacgccgcgttggacggatctggacgtcaaccaacacgtcaataatgtgaagtacattggttggatcttgcagagcgttccgaccgaagtgtttgaaacgcaagagctgtgcggcttgaccctggagtatcgtcgcgagtgtggtcgtgactccgttttggagtctgttaccgcaatggacccaagcaaggaaggtgatcgtagcctgtatcaacacctgctgcgcctggaggacggtgcggatattgttaagggccgtaccgaatggcgtccgaagaacgcgggtgcgaaaggtgcaatcctgacgggtaagaccagcaacggcaatagcatcagctaatagtcaaaagcctccggtcggaggcttttgactttctgcttactgaatttgcggccgcccccacttcagaagttcctatactttctagagaataggaacttcactatagagtcgaataagggcgacaccccataattagcccgggcgaaaggcccagtctttcgactgagcctttcgttttatttgatgcctggcagttccctactctcgcatggggagtccccacactaccatcggcgctacggcgtttcacttctgagttcggcatggggtcaggtgggaccaccgcgctactgccgccaggcaaacaaggggtgttatgagccatattcaggtataaatgggctcgcgataatgttcagaattggttaattggttgtaacactgacccctatttgtttatttttctaaatacattcaaatatgtatccgctcatgagacaataaccctgataaatgcttcaataatattgaaaaaggaagaatatgagtattcaacatttccgtgtcgcccttattcccttttttgcggcattttgccttcctgtttttgctcacccagaaacgctggtgaaagtaaaagatgctgaagatcagttgggtgcacgagtgggttacatcgaactggatctcaacagcggtaagatccttgagagttttcgccccgaagaacgttttccaatgatgagcacttttaaagttctgctatgtggcgcggtattatcccgtattgacgccgggcaagagcaactcggtcgccgcatacactattctcagaatgacttggttgagtactcaccagtcacagaaaagcatcttacggatggcatgacagtaagagaattatgcagtgctgccataaccatgagtgataacactgcggccaacttacttctgacaacgatcggaggaccgaaggagctaaccgcttttttgcacaacatgggggatcatgtaactcgccttgatcgttgggaaccggagctgaatgaagccataccaaacgacgagcgtgacaccacgatgcctgtagcgatggcaacaacgttgcgcaaactattaactggcgaactacttactctagcttcccggcaacaattaatagactggatggaggcggataaagttgcaggaccacttctgcgctcggcccttccggctggctggtttattgctgataaatccggagccggtgagcgtggttctcgcggtatcatcgcagcgctggggccagatggtaagccctcccgtatcgtagttatctacacgacggggagtcaggcaactatggatgaacgaaatagacagatcgctgagataggtgcctcactgattaagcattggt

SEQ ID NO: 21 - DNA, 1752 bp, Escherichia coli
atgttaacggcatgtatatcatttggggttgcgatgacgacgaacacgcattttagaggtgaagaattgaagaaggtttggcttaaccgttatcccgcggacgttccgacggagatcaaccctgaccgttatcaatctctggtagatatgtttgagcagtcggtcgcgcgctacgccgatcaacctgcgtttgtgaatatgggggaggtaatgaccttccgcaagctggaagaacgcagtcgcgcgtttgccgcttatttgcaacaagggttggggctgaagaaaggcgatcgcgttgcgttgatgatgcctaatttattgcaatatccggtggcgctgtttggcattttgcgtgccgggatgatcgtcgtaaacgttaacccgttgtataccccgcgtgagcttgagcatcagcttaacgatagcggcgcatcggcgattgttatcgtgtctaactttgctcacacactggaaaaagtggttgataaaaccgccgttcagcacgtaattctgacccgtatgggcgatcagctatctacggcaaaaggcacggtagtcaatttcgttgttaaatacatcaagcgtttggtgccgaaataccatctgccagatgccatttcatttcgtagcgcactgcataacggctaccggatgcagtacgtcaaacccgaactggtgccggaagatttagcttttctgcaatacaccggcggcaccactggtgtggcgaaaggcgcgatgctgactcaccgcaatatgctggcgaacctggaacaggttaacgcgacctatggtccgctgttgcatccgggcaaagagctggtggtgacggcgctgccgctgtatcacatttttgccctgaccattaactgcctgctgtttatcgaactgggtgggcagaacctgcttatcactaacccgcgcgatattccagggttggtaaaagagttagcgaaatatccgtttaccgctatcacgggcgttaacaccttgttcaatgcgttgctgaacaataaagagttccagcagctggatttctccagtctgcatctttccgcaggcggtgggatgccagtgcagcaagtggtggcagagcgttgggtgaaactgaccggacagtatctgctggaaggctatggccttaccgagtgtgcgccgctggtcagcgttaacccatatgatattgattatcatagtggtagcatcggtttgccggtgccgtcgacggaagccaaactggtggatgatgatgataatgaagtaccaccaggtcaaccgggtgagctttgtgtcaaaggaccgcaggtgatgctgggttactggcagcgtcccgatgctaccgatgaaatcatcaaaaatggctggttacacaccggcgacatcgcggtaatggatgaagaaggattcctgcgcattgtcgatcgtaaaaaagacatgattctggtttccggttttaacgtctatcccaacgagattgaagatgtcgtcatgcagcatcctggcgtacaggaagtcgcggctgttggcgtaccttccggctccagtggtgaagcggtgaaaatcttcgtagtgaaaaaagatccatcgcttaccgaagagtcactggtgactttttgccgccgtcagctcacgggatacaaagtaccgaagctggtggagtttcgtgatgagttaccgaaatctaacgtcggaaaaattttgcgacgagaattacgtgacgaagcgcgcggcaaagtggacaataaagcctga

SEQ ID NO: 22 - DNA, 1377 bp, Acinetobacter sp.
atgcgcccattacatccgattgattttatattcctgtcactagaaaaaagacaacagcctatgcatgtaggtggtttatttttgtttcagattcctgataacgccccagacacctttattcaagatctggtgaatgatatccggatatcaaaatcaatccctgttccaccattcaacaataaactgaatgggcttttttgggatgaagatgaagagtttgatttagatcatcattttcgtcatattgcactgcctcatcctggtcgtattcgtgaattgcttatttatatttcacaagagcacagtacgctgctagatcgggcaaagcccttgtggacctgcaatattattgaaggaattgaaggcaatcgttttgccatgtacttcaaaattcaccatgcgatggtcgatggcgttgctggtatgcggttaattgaaaaatcactctcccatgatgtaacagaaaaaagtatcgtgccaccttggtgtgttgagggaaaacgtgcaaagcgcttaagagaacctaaaacaggtaaaattaagaaaatcatgtctggtattaagagtcagcttcaggcgacacccacagtcattcaagagctttctcagacagtatttaaagatattggacgtaatcctgatcatgtttcaagctttcaggcgccttgttctattttgaatcagcgtgtgagctcatcgcgacgttttgcagcacagtcttttgacctagatcgttttcgtaatattgccaaatcgttgaatgtgaccattaatgatgttgtactagcggtatgttctggtgcattacgtgcgtatttgatgagtcataatagtttgccttcaaaaccattaattgccatggttccagcctctattcgcaatgacgattcagatgtcagcaaccgtattacgatgattctggcaaatttggcaacccacaaagatgatcctttacaacgtcttgaaattatccgccgtagtgttcaaaactcaaagcaacgcttcaaacgtatgaccagcgatcagattctaaattatagtgctgtcgtatatggccctgcaggactcaacataatttctggcatgatgccaaaacgccaagccttcaatctggttatttccaatgtgcctggcccaagagagccactttactggaatggtgccaaacttgatgcactctacccagcttcaattgtattagacggtcaagcattgaatattacaatgaccagttatttagataaacttgaagttggtttgattgcatgccgtaatgcattgccaagaatgcagaatttactgacacatttagaagaagaaattcaactatttgaaggcgtaattgcaaagcaggaagatattaaaacagccaattaa

SEQ ID NO: 23 - DNA, 139 bp, Artificial Sequence
  Synthetic Promoter
aacaattacgagcttcatgcacagtgatcgacgctgttgacaattaatcatcggctcgtataatgtgtggatgtggaattgtgagcgctcacaattccacaacggtttccctctagaaataattttgtttaacaggagg

SEQ ID NO: 24 - DNA, 35 bp, Artificial Sequence
  Synthetic Primer
ttatgcgactcctgcgtttagggaaagagcatttg

SEQ ID NO: 25 - DNA, 32 bp, Artificial Sequence
  Synthetic Primer
gttaacatatgttttacctcctgttaaacaaa

SEQ ID NO: 26 - DNA, 32 bp, Artificial Sequence
  Synthetic Primer
taaaacatatgttaacggcatgtatatcattt

SEQ ID NO: 27 - DNA, 32 bp, Artificial Sequence
  Synthetic Primer
tctcctcagacttaacgctcaggctttattgt

SEQ ID NO: 28 - DNA, 32 bp, Artificial Sequence
  Synthetic Primer
gttaagtctgaggagatccacgctatgcgccc

SEQ ID NO: 29 - DNA, 34 bp, Artificial Sequence
  Primer
caattgagatctgccacgactgcaatggttcatc

SEQ ID NO: 30 - DNA, 7316 bp, Artificial Sequence
  Synthetic Vector
cgggatctcgacgctctcccttatgcgactcctgcgtttagggaaagagcatttgtcagaatatttaagggcgcctgtcactttgcttgatatatgagaattatttaaccttataaatgagaaaaaagcaacgcactttaaataagatacgttgctttttcgattgatgaacacctataattaaactattcatctattatttatgattttttgtatatacaatatttctagtttgttaaagagaattaagaaaataaatctcgaaaataataaagggaaaatcagtttttgatatcaaaattatacatgtcaacgataatacaaaatataatacaaactataagatgttatcagtatttattatgcatttagaataccttttgtgtcgcccttattcgactccctatagaagttcctattctctagaaagtataggaacttcccttcattttggatccaattgtgagcggataacaattacgagcttcatgcacagtgatcgacgctgttgacaattaatcatcggctcgtataatgtgtggatgtggaattgtgagcgctcacaattccacaacggtttccctctagaaataattttgtttaacaggaggtaaaacatatgttaacggcatgtatatcatttggggttgcgatgacgacgaacacgcattttagaggtgaagaattgaagaaggtttggcttaaccgttatcccgcggacgttccgacggagatcaaccctgaccgttatcaatctctggtagatatgtttgagcagtcggtcgcgcgctacgccgatcaacctgcgtttgtgaatatgggggaggtaatgaccttccgcaagctggaagaacgcagtcgcgcgtttgccgcttatttgcaacaagggttggggctgaagaaaggcgatcgcgttgcgttgatgatgcctaatttattgcaatatccggtggcgctgtttggcattttgcgtgccgggatgatcgtcgtaaacgttaacccgttgtataccccgcgtgagcttgagcatcagcttaacgatagcggcgcatcggcgattgttatcgtgtctaactttgctcacacactggaaaaagtggttgataaaaccgccgttcagcacgtaattctgacccgtatgggcgatcagctatctacggcaaaaggcacggtagtcaatttcgttgttaaatacatcaagcgtttggtgccgaaataccatctgccagatgccatttcatttcgtagcgcactgcataacggctaccggatgcagtacgtcaaacccgaactggtgccggaagatttagcttttctgcaatacaccggcggcaccactggtgtggcgaaaggcgcgatgctgactcaccgcaatatgctggcgaacctggaacaggttaacgcgacctatggtccgctgttgcatccgggcaaagagctggtggtgacggcgctgccgctgtatcacatttttgccctgaccattaactgcctgctgtttatcgaactgggtgggcagaacctgcttatcactaacccgcgcgatattccagggttggtaaaagagttagcgaaatatccgtttaccgctatcacgggcgttaacaccttgttcaatgcgttgctgaacaataaagagttccagcagctggatttctccagtctgcatctttccgcaggcggtgggatgccagtgcagcaagtggtggcagagcgttgggtgaaactgaccggacagtatctgctggaaggctatggccttaccgagtgtgcgccgctggtcagcgttaacccatatgatattgattatcatagtggtagcatcggtttgccggtgccgtcgacggaagccaaactggtggatgatgatgataatgaagtaccaccaggtcaaccgggtgagctttgtgtcaaaggaccgcaggtgatgctgggttactggcagcgtcccgatgctaccgatgaaatcatcaaaaatggctggttacacaccggcgacatcgcggtaatggatgaagaaggattcctgcgcattgtcgatcgtaaaaaagacatgattctggtttccggttttaacgtctatcccaacgagattgaagatgtcgtcatgcagcatcctggcgtacaggaagtcgcggctgttggcgtaccttccggctccagtggtgaagcggtgaaaatcttcgtagtgaaaaaagatccatcgcttaccgaagagtcactggtgactttttgccgccgtcagctcacgggatacaaagtaccgaagctggtggagtttcgtgatgagttaccgaaatctaacgtcggaaaaattttgcgacgagaattacgtgacgaagcgcgcggcaaagtggacaataaagcctgagcgttaagtctgaggagatccacgctatgcgcccattacatccgattgattttatattcctgtcactagaaaaaagacaacagcctatgcatgtaggtggtttatttttgtttcagattcctgataacgccccagacacctttattcaagatctggtgaatgatatccggatatcaaaatcaatccctgttccaccattcaacaataaactgaatgggcttttttgggatgaagatgaagagtttgatttagatcatcattttcgtcatattgcactgcctcatcctggtcgtattcgtgaattgcttatttatatttcacaagagcacagtacgctgctagatcgggcaaagcccttgtggacctgcaatattattgaaggaattgaaggcaatcgttttgccatgtacttcaaaattcaccatgcgatggtcgatggcgttgctggtatgcggttaattgaaaaatcactctcccatgatgtaacagaaaaaagtatcgtgccaccttggtgtgttgagggaaaacgtgcaaagcgcttaagagaacctaaaacaggtaaaattaagaaaatcatgtctggtattaagagtcagcttcaggcgacacccacagtcattcaagagctttctcagacagtatttaaagatattggacgtaatcctgatcatgtttcaagctttcaggcgccttgttctattttgaatcagcgtgtgagctcatcgcgacgttttgcagcacagtcttttgacctagatcgttttcgtaatattgccaaatcgttgaatgtgaccattaatgatgttgtactagcggtatgttctggtgcattacgtgcgtatttgatgagtcataatagtttgccttcaaaaccattaattgccatggttccagcctctattcgcaatgacgattcagatgtcagcaaccgtattacgatgattctggcaaatttggcaacccacaaagatgatcctttacaacgtcttgaaattatccgccgtagtgttcaaaactcaaagcaacgcttcaaacgtatgaccagcgatcagattctaaattatagtgctgtcgtatatggccctgcaggactcaacataatttctggcatgatgccaaaacgccaagccttcaatctggttatttccaatgtgcctggcccaagagagccactttactggaatggtgccaaacttgatgcactctacccagcttcaattgtattagacggtcaagcattgaatattacaatgaccagttatttagataaacttgaagttggtttgattgcatgccgtaatgcattgccaagaatgcagaatttactgacacatttagaagaagaaattcaactatttgaaggcgtaattgcaaagcaggaagatattaaaacagccaattaaaaacaataaacttgattttttaatttatcagataaaactaaagggctaaattagccctttagtttttaacagtacgacactgtttaagtaattgatgacacacatgatgaaccattgcagtcgtggcagatctcaattggatatcggccggccacgcgatcgctgacgtcggtaccctcgagtctggtaaagaaaccgctgctgcgaaatttgaacgccagcacatggactcgtctactagcgcagcttaattaacctaggctgctgccaccgctgagcaataactagcataaccccttggggcctctaaacgggtcttgaggggttttttgctgaaacctcaggcatttgagaagcacacggtcacactgcttccggtagtcaataaaccggtaaaccagcaatagacataagcggctatttaacgaccctgccctgaaccgacgaccgggtcatcgtggccggatcttgcggcccctcggcttgaacgaattgttagacattatttgccgactaccttggtgatctcgcctttcacgtagtggacaaattcttccaactgatctgcgcgcgaggccaagcgatcttcttcttgtccaagataagcctgtctagcttcaagtatgacgggctgatactgggccggcaggcgctccattgcccagtcggcagcgacatccttcggcgcgattttgccggttactgcgctgtaccaaatgcgggacaacgtaagcactacatttcgctcatcgccagcccagtcgggcggcgagttccatagcgttaaggtttcatttagcgcctcaaatagatcctgttcaggaaccggatcaaagagttcctccgccgctggacctaccaaggcaacgctatgttctcttgcttttgtcagcaagatagccagatcaatgtcgatcgtggctggctcgaagatacctgcaagaatgtcattgcgctgccattctccaaattgcagttcgcgcttagctggataacgccacggaatgatgtcgtcgtgcacaacaatggtgacttctacagcgcggagaatctcgctctctccaggggaagccgaagtttccaaaaggtcgttgatcaaagctcgccgcgttgtttcatcaagccttacggtcaccgtaaccagcaaatcaatatcactgtgtggcttcaggccgccatccactgcggagccgtacaaatgtacggccagcaacgtcggttcgagatggcgctcgatgacgccaactacctctgatagttgagtcgatacttcggcgatcaccgcttccctcatactcttcctttttcaatattattgaagcatttatcagggttattgtctcatgagcggatacatatttgaatgtatttagaaaaataaacaaatagctagctcactcggtcgctacgctccgggcgtgagactgcggcgggcgctgcggacacatacaaagttacccacagattccgtggataagcaggggactaacatgtgaggcaaaacagcagggccgcgccggtggcgtttttccataggctccgccctcctgccagagttcacataaacagacgcttttccggtgcatctgtgggagccgtgaggctcaaccatgaatctgacagtacgggcgaaacccgacaggacttaaagatccccaccgtttccggcgggtcgctccctcttgcgctctcctgttccgaccctgccgtttaccggatacctgttccgcctttctcccttacgggaagtgtggcgctttctcatagctcacacactggtatctcggctcggtgtaggtcgttcgctccaagctgggctgtaagcaagaactccccgttcagcccgactgctgcgccttatccggtaactgttcacttgagtccaacccggaaaagcacggtaaaacgccactggcagcagccattggtaactgggagttcgcagaggatttgtttagctaaacacgcggttgctcttgaagtgtgcgccaaagtccggctacactggaaggacagatttggttgctgtgctctgcgaaagccagttaccacggttaagcagttccccaactgacttaaccttcgatcaaaccacctccccaggtggttttttcgtttacagggcaaaagattacgcgcagaaaaaaaggatctcaagaagatcctttgatcttttctactgaaccgctctagatttcagtgcaatttatctcttcaaatgtagcacctgaagtcagccccatacgatataagttgtaattctcatgttagtcatgccccgcgcccaccggaaggagctgactgggttgaaggctctcaagggcatcggtcgagatcccggtgcctaatgagtgagctaacttacattaattgcgttgcgctcactgcccgctttccagtcgggaaacctgtcgtgccagctgcattaatgaatcggccaacgcgcggggagaggcggtttgcgtattgggcgccagggtggtttttcttttcaccagtgagacgggcaacagctgattgcccttcaccgcctggccctgagagagttgcagcaagcggtccacgctggtttgccccagcaggcgaaaatcctgtttgatggtggttaacggcgggatataacatgagctgtcttcggtatcgtcgtatcccactaccgagatgtccgcaccaacgcgcagcccggactcggtaatggcgcgcattgcgcccagcgccatctgatcgttggcaaccagcatcgcagtgggaacgatgccctcattcagcatttgcatggtttgttgaaaaccggacatggcactccagtcgccttcccgttccgctatcggctgaatttgattgcgagtgagatatttatgccagccagccagacgcagacgcgccgagacagaacttaatgggcccgctaacagcgcgatttgctggtgacccaatgcgaccagatgctccacgcccagtcgcgtaccgtcttcatgggagaaaataatactgttgatgggtgtctggtcagagacatcaagaaataacgccggaacattagtgcaggcagcttccacagcaatggcatcctggtcatccagcggatagttaatgatcagcccactgacgcgttgcgcgagaagattgtgcaccgccgctttacaggcttcgacgccgcttcgttctaccatcgacaccaccacgctggcacccagttgatcggcgcgagatttaatcgccgcgacaatttgcgacggcgcgtgcagggccagactggaggtggcaacgccaatcagcaacgactgtttgcccgccagttgttgtgccacgcggttgggaatgtaattcagctccgccatcgccgcttccactttttcccgcgttttcgcagaaacgtggctggcctggttcaccacgcgggaaacggtctgataagagacaccggcatactctgcgacatcgtataacgttactggtttcacattcaccaccctgaattgactctcttccgggcgctatcatgccataccgcgaaaggttttgcgccattcgatggtgtc

SEQ ID NO: 31 - DNA, 906 bp, Umbellularia californica
  CDS (1)..(906)
atgactctagagtggaaaccgaaaccaaaactgcctcaactgctggatgatcacttcggtctgcacggtctggtgtttcgtcgtactttcgcaattcgttcttatgaagtgggtccagatcgttctacctccatcctggccgtcatgaaccacatgcaggaagccaccctgaatcacgcgaaatctgttggtatcctgggtgatggtttcggcactactctggaaatgtctaaacgtgacctgatgtgggtagtgcgtcgcacccacgtagcagtagagcgctaccctacttggggtgacactgtggaagtcgagtgttggattggcgcgtccggtaacaatggtatgcgtcgcgattttctggtccgtgactgtaaaacgggcgaaatcctgacgcgttgcacctccctgagcgttctgatgaacacccgcactcgtcgcctgtctaccatcccggacgaagtgcgcggtgagatcggtcctgctttcatcgataacgtggcagttaaagacgacgaaatcaagaaactgcaaaaactgaacgactccaccgcggactacatccagggcggtctgactccgcgctggaacgacctggatgttaatcagcatgtgaacaacctgaaatacgttgcttgggtcttcgagactgtgccggacagcattttcgaaagccatcacatttcctcttttactctggagtaccgtcgcgaatgtactcgcgactccgttctgcgcagcctgaccaccgtaagcggcggttctagcgaggcaggtctggtctgcgaccatctgctgcaactggaaggcggctccgaagtcctgcgtgcgcgtacggagtggcgtccaaagctgacggattctttccgcggcatctccgtaattccggcggaacctcgtgtttaa

SEQ ID NO: 32 - protein, 301 aa, Umbellularia californica
MTLEWKPKPKLPQLLDDHFGLHGLVFRRTFAIRSYEVGPDRSTSILAVMNHMQEATLNHAKSVGILGDGFGTTLEMSKRDLMWVVRRTHVAVERYPTWGDTVEVECWIGASGNNGMRRDFLVRDCKTGEILTRCTSLSVLMNTRTRRLSTIPDEVRGEIGPAFIDNVAVKDDEIKKLQKLNDSTADYIQGGLTPRWNDLDVNQHVNNLKYVAWVFETVPDSIFESHHISSFTLEYRRECTRDSVLRSLTTVSGGSSEAGLVCDHLLQLEGGSEVLRARTEWRPKLTDSFRGISVIPAEPRV

SEQ ID NO: 33 - DNA, 1137 bp, Bacillus subtilis; identical to SEQ ID NO: 11
  CDS (1)..(1137)

SEQ ID NO: 34 - protein, 378 aa, Bacillus subtilis
MIIGVPKEIKNNENRVALTPGGVSQLISNGHRVLVETGAGLGSGFENEAYESAGAEIIADPKQVWDAEMVMKVKEPLPEEYVYFRKGLVLFTYLHLAAEPELAQALKDKGVTAIAYETVSEGRTLPLLTPMSEVAGRMAAQIGAQFLEKPKGGKGILLAGVPGVSRGKVTIIGGGVVGTNAAKMAVGLGADVTIIDLNADRLRQLDDIFGHQIKTLISNPVNIADAVAEADLLICAVLIPGAKAPTLVTEEMVKQMKPGSVIVDVAIDQGGIVETVDHITTHDQPTYEKHGVVHYAVANMPGAVPRTSTIALTNVTVPYALQIANKGAVKALADNTALRAGLNTANGHVTYEAVARDLGYEYVPAEKALQDESSVAGA

SEQ ID NO: 35 - DNA, 1380 bp, Chromobacterium violaceum; identical to SEQ ID NO: 12
  CDS (1)..(1380)

SEQ ID NO: 36 - protein, 459 aa, Chromobacterium violaceum
MQKQRTTSQWRELDAAHHLHPFTDTASLNQAGARVMTRGEGVYLWDSEGNKIIDGMAGLWCVNVGYGRKDFAEAARRQMEELPFYNTFFKTTHPAVVELSSLLAEVTPAGFDRVFYTNSGSESVDTMIRMVRRYWDVQGKPEKKTLIGRWNGYHGSTIGGASLGGMKYMHEQGDLPIPGMAHIEQPWWYKHGKDMTPDEFGVVAARWLEEKILEIGADKVAAFVGEPIQGAGGVIVPPATYWPEIERICRKYDVLLVADEVICGFGRTGEWFGHQHFGFQPDLFTAAKGLSSGYLPIGAVFVGKRVAEGLIAGGDFNHGFTYSGHPVCAAVAHANVAALRDEGIVQRVKDDIGPYMQKRWRETFSRFEHVDDVRGVGMVQAFTLVKNKAKRELFPDFGEIGTLCRDIFFRNNLIMRACGDHIVSAPPLVMTRAEVDEMLAVAERCLEEFEQTLKARGLA

SEQ ID NO: 37 - DNA, 159 bp, Artificial Sequence
  Synthetic Promoter
ggatccaattgtgagcggataacaattacgagcttcatgcacagtgatcgacgctgttgacaattaatcatcggctcgtataatgtgtggatgtggaattgtgagcgctcacaattccacaacggtttccctctagaaataattttgtttaacaggagg

SEQ ID NO: 38 - DNA, 7958 bp, Artificial Sequence
  Synthetic vector
ctagattattaggcgaggccacgcgctttgagggtctgttcaaattcttcgaggcaacgttccgccacggcgagcatttcatccacttccgcacgggtcataacgagcggcggtgcagacacaatgtgatcgccgcacgcacgcataatgaggttgttgcgaaaaaaaatatcgcggcagagggtgccaatttcgccaaaatccggaaagagttcacgtttcgctttgtttttcacgagggtaaacgcctgcaccatgcccacgccacgcacatcatccacatgttcaaaacggctaaaggtttcacgccaacgtttctgcatatacgggccaatatcatctttcacacgctgcacaatgccttcatcacggagcgccgcaacattcgcatgcgccaccgccgcacacaccggatggccgctataggtaaagccatggttaaaatcaccgcccgcaatgagaccttccgcaacacgtttgcccacaaacaccgcgccaatcgggagatagccgctgctgaggcctttcgccgcggtaaagaggtccggctgaaagccaaaatgctgatggccaaaccattcgccggtacggccaaagccgcaaatcacttcatccgcaacgaggagcacatcatatttgcggcaaatacgttcaatttccggccaataggttgccggcggaacaatcacaccgcccgcaccctgaatcggttcgcccacaaacgccgccactttatccgcgccgatttcgagaattttttcttcgagccaacgcgccgcaaccacgccaaattcatccggggtcatatctttgccatgtttataccaccacggctgttcaatatgcgccatgcccggaatcgggagatcgccctgttcatgcatatatttcatgccgccgaggctcgcaccgccaatggtgctgccgtgatagccgttccaacggccaatgagggtttttttttccggtttgccctgcacatcccaataacgacgcaccatacgaatcatggtatccacgctttcgctgccgctgttggtataaaacacacgatcaaaacctgccggggtaacttcggcgaggaggctgctgagttccaccaccgccggatgggtggttttaaagaaggtgttataaaacgggagttcttccatctgacgacgcgccgcttccgcaaaatctttacggccatagcccacgttcacgcaccagaggcccgccatgccatcaataattttgttgccttcgctatcccagagatacacgccttcgccacgggtcatcacacgcgcacccgcctgattgaggctcgcggtatcggtaaacggatggagatgatgcgccgcatcgagttcacgccactgagaggtggtacgctgtttctgcatattatatctccttaaagctttaagcacccgccacagatgattcatcctgtaaagctttctcggcaggaacatactcatagcctagatctcttgctacagcttcataggtcacgtgtccgtttgcggtgtttaaacccgctctcagtgccgtattgtctgcgagcgcttttactgcccctttgttcgcgatttgcagcgcgtatggaacagtaacgttagtcagggcgattgttgatgtacgagggactgcgcctggcatgttcgctacagcataatgcacaaccccgtgtttttcatatgttggctgatcatgtgttgtgatatggtcgacagtttcgacgatgccgccttggtcgatcgctacatcaacaataactgaaccgggtttcatttgttttaccatttcctcagtgacaagagtcggagctttagcacccggaattaataccgcgcaaatgaggagatccgcttccgccacagcatcagcaatattgaccggattagaaattaacgttttaatctgatggccgaagatgtcatcaagctggcgcaagcggtctgcgtttaagtcaatgatcgtcacatctgcaccgaggccgacagccattttcgccgcgtttgtcccgacaacgcctcctccgataattgttacttttccgcgggaaacgccaggcaccccggcaagcagaatgccttttccgcctttaggcttttctaagaattgagcgccgatttgcgctgccattctgcccgcaacctctgacattggcgtcagaagaggcaatgtccggccttcactgaccgtttcatatgcgatggcagttactcctttatccttcaaggcctgtgcaagctcaggctcagctgctaaatgaaggtacgtaaacagcacaagtcctttgcgaaaataaacatattcttccggcagcggttcttttactttcatgaccatttcggcgtcccagacctgcttcggatcagcaatgatttccgctcctgctgactcataggcttcattttcaaatccgcttccaaggcccgcgcctgtttcaaccagcacccggtggccgtttgaaatgagctgagaaacgcccccgggtgttaatgcgacacggttttcattgttttttatctctttaggaacccctatgatcattatgccactctccttggttcctagatcctgtgtgaaattgttattgttatccgctcacaattccacacattatacgagccggaagcataaagtgtcaagcctggggtgcctaatgagtgagctaacttacattaattgcgttgcgctcactgcccgcatatctatgagccgggctgaatgatcgaccgagacaggccctgcggggctgcaggatccaattgtgagcggataacaattacgagcttcatgcacagtgatcgacgctgttgacaattaatcatcggctcgtataatgtgtggatgtggaattgtgagcgctcacaattccacaacggtttccctctagaaataattttgtttacaaggaggattataaaatgactctagagtggaaaccgaaaccaaaactgcctcaactgctggatgatcacttcggtctgcacggtctggtgtttcgtcgtactttcgcaattcgttcttatgaagtgggtccagatcgttctacctccatcctggccgtcatgaaccacatgcaggaagccaccctgaatcacgcgaaatctgttggtatcctgggtgatggtttcggcactactctggaaatgtctaaacgtgacctgatgtgggtagtgcgtcgcacccacgtagcagtagagcgctaccctacttggggtgacactgtggaagtcgagtgttggattggcgcgtccggtaacaatggtatgcgtcgcgattttctggtccgtgactgtaaaacgggcgaaatcctgacgcgttgcacctccctgagcgttctgatgaacacccgcactcgtcgcctgtctaccatcccggacgaagtgcgcggtgagatcggtcctgctttcatcgataacgtggcagttaaagacgacgaaatcaagaaactgcaaaaactgaacgactccaccgcggactacatccagggcggtctgactccgcgctggaacgacctggatgttaatcagcatgtgaacaacctgaaatacgttgcttgggtcttcgagactgtgccggacagcattttcgaaagccatcacatttcctcttttactctggagtaccgtcgcgaatgtactcgcgactccgttctgcgcagcctgaccaccgtaagcggcggttctagcgaggcaggtctggtctgcgaccatctgctgcaactggaaggcggctccgaagtcctgcgtgcgcgtacggagtggcgtccaaagctgacggattctttccgcggcatctccgtaattccggcggaacctcgtgtttaagctttagtcaaaagcctccggtcggaggcttttgactttctgcttactgaatttgcggccgcctcgagaaaatgaagggaagttcctatacttactagagaataggaacttctatagggagtcgaataagggcgacacaaaaggtattctaaatgcataataaatactgataacatcttatagtttgtattatattttgtattatcgttgacatgtataattttgatatcaaaaactgattttccctttattattttcgagatttattttcttaattctctttaacaaactagaaatattgtatatacaaaaaatcataaataatagatgaatagtttaattataggtgttcatcaatcgaaaaagcaacgtatcttatttaaagtgcgttgcttttttctcatttataaggttaaataattctcatatatcaagcaaagtgacaggcgcccttaaatattctgacaaatgctctttccctaaactccccccataaaaaaacccgccgaagcgggtttttacgttatttgcggattaacgattactcgttatcagaaccgcccaggatgcctggcagttccctactctcgccgctgcgctcggtcgttcggctgcgggacctcagcgctagcggagtgtatactggcttactatgttggcactgatgagggtgtcagtgaagtgcttcatgtggcaggagaaaaaaggctgcaccggtgcgtcagcagaatatgtgatacaggatatattccgcttcctcgctcactgactcgctacgctcggtcgttcgactgcggcgagcggaaatggcttacgaacggggcggagatttcctggaagatgccaggaagatacttaacagggaagtgagagggccgcggcaaagccgtttttccataggctccgcccccctgacaagcatcacgaaatctgacgctcaaatcagtggtggcgaaacccgacaggactataaagataccaggcgtttccccctggcggctccctcgtgcgctctcctgttcctgcctttcggtttaccggtgtcattccgctgttatggccgcgtttgtctcattccacgcctgacactcagttccgggtaggcagttcgctccaagctggactgtatgcacgaaccccccgttcagtccgaccgctgcgccttatccggtaactatcgtcttgagtccaacccggaaagacatgcaaaagcaccactggcagcagccactggtaattgatttagaggagttagtcttgaagtcatgcgccggttaaggctaaactgaaaggacaagttttggtgactgcgctcctccaagccagttacctcggttcaaagagttggtagctcagagaaccttcgaaaaaccgccctgcaaggcggttttttcgttttcagagcaagagattacgcgcagaccaaaacgatctcaagaagatcatcttattaatcactgcccgctttccagtcgggaaacctgtcgtgccagctgcattaatgaatcggccaacgcgcggggagaggcggtttgcgtattgggcgccagggtggtttttcttttcaccagtgagactggcaacagctgattgcccttcaccgcctggccctgagagagttgcagcaagcggtccacgctggtttgccccagcaggcgaaaatcctgtttgatggtggttaacggcgggatataacatgagctatcttcggtatcgtcgtatcccactaccgagatatccgcaccaacgcgcagcccggactcggtaatggcgcgcattgcgcccagcgccatctgatcgttggcaaccagcatcgcagtgggaacgatgccctcattcagcatttgcatggtttgttgaaaaccggacatggcactccagtcgccttcccgttccgctatcggctgaatttgattgcgagtgagatatttatgccagccagccagacgcagacgcgccgagacagaacttaatgggcccgctaacagcgcgatttgctggtgacccaatgcgaccagatgctccacgcccagtcgcgtaccgtcctcatgggagaaaataatactgttgatgggtgtctggtcagagacatcaagaaataacgccggaacattagtgcaggcagcttccacagcaatggcatcctggtcatccagcggatagttaatgatcagcccactgacgcgttgcgcgagaagattgtgcaccgccgctttacaggcttcgacgccgcttcgttctaccatcgacaccaccacgctggcacccagttgatcggcgcgagatttaatcgccgcgacaatttgcgacggcgcgtgcagggccagactggaggtggcaacgccaatcagcaacgactgtttgcccgccagttgttgtgccacgcggttgggaatgtaattcagctccgccatcgccgcttccactttttcccgcgttttcgcagaaacgtggctggcctggttcaccacgcgggaaacggtctgataagagacaccggcatactctgcgacatcgtataacgttactggtttcatattcaccaccctgaattgactctcttccgggcgctatcatgccataccgcgaaaggttttgcgccattcgatggcgcgccgcttttaccaatgcttaatcagtgaggcacctatctcagcgatctgtctatttcgttcatccatagttgcctgactccccgtcgtgtagataactacgatacgggagggcttaccatctggccccagcgctgcgatgataccgcgagaaccacgctcaccggctccggatttatcagcaataaaccagccagccggaagggccgagcgcagaagtggtcctgcaactttatccgcctccatccagtctattaattgttgccgggaagctagagtaagtagttcgccagttaatagtttgcgcaacgttgttgccatcgctacaggcatcgtggtgtcacgctcgtcgtttggtatggcttcattcagctccggttcccaacgatcaaggcgagttacatgatcccccatgttgtgcaaaaaagcggttagctccttcggtcctccgatcgttgtcagaagtaagttggccgcagtgttatcactcatggttatggcagcactgcataattctcttactgtcatgccatccgtaagatgcttttctgtgactggtgagtactcaaccaagtcattctgagaatagtgtatgcggcgaccgagttgctcttgcccggcgtcaatacgggataataccgcgccacatagcagaactttaaaagtgctcatcattggaaaacgttcttcggggcgaaaactctcaaggatcttaccgctgttgagatccagttcgatgtaacccactcgtgcacccaactgatcttcagcatcttttactttcaccagcgtttctgggtgagcaaaaacaggaaggcaaaatgccgcaaaaaagggaataagggcgacacggaaatgttgaatactcatattcttcctttttcaatattattgaagcatttatcagggttattgtctcatgagcggatacatatttgaatgtatttagaaaaataaacaaataggggtcagtgttacaaccaattaaccaattctgaacattatcgcgagcccatttatacctgaatatggctcataacaccccttgtttgcctggcggcagtagcgcggtggtcccacctgaccccatgccgaactcagaagtgaaacgccgtagcgccgatggtagtgtggggactccccatgcgagagtagggaactgccaggcatcaaataaaacgaaaggctcagtcgaaagactgggcctttcgcccgggctaattatggggtgtcgcccttattcgactctatagtgaagttcctattctctagtagtataggaacttctgaagtggggctcgagggccggcccagccgtcaaggttaaggctggccatatcagcgactgaaaagcggccagcctcggccttgtttgacgtataaccaaagccaccgggcaaccaatagcccttgtcacttttgatcaggtagaccgaccctgaagcgcttttttcgtattccataaaacccccttctgtgcgtgagtactcatagtataacaggcgtgagtaccaacgct

SEQ ID NO: 39 - DNA, 4977 bp, Artificial Sequence
  Synthetic vector
accaatgcttaatcagtgaggcacctatctcagcgatctgtctatttcgttcatccatagttgcctgactccccgtcgtgtagataactacgatacgggagggcttaccatctggccccagcgctgcgatgataccgcgagaaccacgctcaccggctccggatttatcagcaataaaccagccagccggaagggccgagcgcagaagtggtcctgcaactttatccgcctccatccagtctattaattgttgccgggaagctagagtaagtagttcgccagttaatagtttgcgcaacgttgttgccatcgctacaggcatcgtggtgtcacgctcgtcgtttggtatggcttcattcagctccggttcccaacgatcaaggcgagttacatgatcccccatgttgtgcaaaaaagcggttagctccttcggtcctccgatcgttgtcagaagtaagttggccgcagtgttatcactcatggttatggcagcactgcataattctcttactgtcatgccatccgtaagatgcttttctgtgactggtgagtactcaaccaagtcattctgagaatagtgtatgcggcgaccgagttgctcttgcccggcgtcaatacgggataataccgcgccacatagcagaactttaaaagtgctcatcattggaaaacgttcttcggggcgaaaactctcaaggatcttaccgctgttgagatccagttcgatgtaacccactcgtgcacccaactgatcttcagcatcttttactttcaccagcgtttctgggtgagcaaaaacaggaaggcaaaatgccgcaaaaaagggaataagggcgacacggaaatgttgaatactcatattcttcctttttcaatattattgaagcatttatcagggttattgtctcatgagcggatacatatttgaatgtatttagaaaaataaacaaataggggtcagtgttacaaccaattaaccaattctgaacattatcgcgagcccatttatacctgaatatggctcataacaccccttgtttgcctggcggcagtagcgcggtggtcccacctgaccccatgccgaactcagaagtgaaacgccgtagcgccgatggtagtgtggggactccccatgcgagagtagggaactgccaggcatcaaataaaacgaaaggctcagtcgaaagactgggcctttcgcccgggctaattatggggtgtcgcccttattcgactctatagtgaagttcctattctctagaaagtataggaacttctgaagtgggggcggccgcaaattcagtaagcagaaagtcaaaagcctccgaccggaggcttttgactaaagcttaaacacgaggttccgccggaattacggagatgccgcggaaagaatccgtcagctttggacgccactccgtacgcgcacgcaggacttcggagccgccttccagttgcagcagatggtcgcagaccagacctgcctcgctagaaccgccgcttacggtggtcaggctgcgcagaacggagtcgcgagtacattcgcgacggtactccagagtaaaagaggaaatgtgatggctttcgaaaatgctgtccggcacagtctcgaagacccaagcaacgtatttcaggttgttcacatgctgattaacatccaggtcgttccagcgcggagtcagaccgccctggatgtagtccgcggtggagtcgttcagtttttgcagtttcttgatttcgtcgtctttaactgccacgttatcgatgaaagcaggaccgatctcaccgcgcacttcgtccgggatggtagacaggcgacgagtgcgggtgttcatcagaacgctcagggaggtgcaacgcgtcaggatttcgcccgttttacagtcacggaccagaaaatcgcgacgcataccattgttaccggacgcgccaatccaacactcgacttccacagtgtcaccccaagtagggtagcgctctactgctacgtgggtgcgacgcactacccacatcaggtcacgtttagacatttccagagtagtgccgaaaccatcacccaggataccaacagatttcgcgtgattcagggtggcttcctgcatgtggttcatgacggccaggatggaggtagaacgatctggacccacttcataagaacgaattgcgaaagtacgacgaaacaccagaccgtgcagaccgaagtgatcatccagcagttgaggcagttttggtttcggtttccactctagagtcattttataatcctccttgtaaacaaaattatttctagagggaaaccgttgtggaattgtgagcgctcacaattccacatccacacattatacgagccgatgattaattgtcaacagcgtcgatcactgtgcatgaagctcgtaattgttatccgctcacaattggatccaaaatgaagggaagttcctatactttctagagaataggaacttctatagggagtcgaataagggcgacacaaaaggtattctaaatgcataataaatactgataacatcttatagtttgtattatattttgtattatcgttgacatgtataattttgatatcaaaaactgattttccctttattattttcgagatttattttcttaattctctttaacaaactagaaatattgtatatacaaaaaatcataaataatagatgaatagtttaattataggtgttcatcaatcgaaaaagcaacgtatcttatttaaagtgcgttgcttttttctcatttataaggttaaataattctcatatatcaagcaaagtgacaggcgcccttaaatattctgacaaatgctctttccctaaactccccccataaaaaaacccgccgaagcgggtttttacgttatttgcggattaacgattactcgttatcagaaccgcccaggatgcctggcagttccctactctcgccgctgcgctcggtcgttcggctgcgggacctcagcgctagcggagtgtatactggcttactatgttggcactgatgagggtgtcagtgaagtgcttcatgtggcaggagaaaaaaggctgcaccggtgcgtcagcagaatatgtgatacaggatatattccgcttcctcgctcactgactcgctacgctcggtcgttcgactgcggcgagcggaaatggcttacgaacggggcggagatttcctggaagatgccaggaagatacttaacagggaagtgagagggccgcggcaaagccgtttttccataggctccgcccccctgacaagcatcacgaaatctgacgctcaaatcagtggtggcgaaacccgacaggactataaagataccaggcgtttccccctggcggctccctcgtgcgctctcctgttcctgcctttcggtttaccggtgtcattccgctgttatggccgcgtttgtctcattccacgcctgacactcagttccgggtaggcagttcgctccaagctggactgtatgcacgaaccccccgttcagtccgaccgctgcgccttatccggtaactatcgtcttgagtccaacccggaaagacatgcaaaagcaccactggcagcagccactggtaattgatttagaggagttagtcttgaagtcatgcgccggttaaggctaaactgaaaggacaagttttggtgactgcgctcctccaagccagttacctcggttcaaagagttggtagctcagagaaccttcgaaaaaccgccctgcaaggcggttttttcgttttcagagcaagagattacgcgcagaccaaaacgatctcaagaagatcatcttattaatcactgcccgctttccagtcgggaaacctgtcgtgccagctgcattaatgaatcggccaacgcgcggggagaggcggtttgcgtattgggcgccagggtggtttttcttttcaccagtgagactggcaacagctgattgcccttcaccgcctggccctgagagagttgcagcaagcggtccacgctggtttgccccagcaggcgaaaatcctgtttgatggtggttaacggcgggatataacatgagctatcttcggtatcgtcgtatcccactaccgagatatccgcaccaacgcgcagcccggactcggtaatggcgcgcattgcgcccagcgccatctgatcgttggcaaccagcatcgcagtgggaacgatgccctcattcagcatttgcatggtttgttgaaaaccggacatggcactccagtcgccttcccgttccgctatcggctgaatttgattgcgagtgagatatttatgccagccagccagacgcagacgcgccgagacagaacttaatgggcccgctaacagcgcgatttgctggtgacccaatgcgaccagatgctccacgcccagtcgcgtaccgtcctcatgggagaaaataatactgttgatgggtgtctggtcagagacatcaagaaataacgccggaacattagtgcaggcagcttccacagcaatggcatcctggtcatccagcggatagttaatgatcagcccactgacgcgttgcgcgagaagattgtgcaccgccgctttacaggcttcgacgccgcttcgttctaccatcgacaccaccacgctggcacccagttgatcggcgcgagatttaatcgccgcgacaatttgcgacggcgcgtgcagggccagactggaggtggcaacgccaatcagcaacgactgtttgcccgccagttgttgtgccacgcggttgggaatgtaattcagctccgccatcgccgcttccactttttcccgcgttttcgcagaaacgtggctggcctggttcaccacgcgggaaacggtctgataagagacaccggcatactctgcgacatcgtataacgttactggtttcatattcaccaccctgaattgactctcttccgggcgctatcatgccataccgcgaaaggttttgcgccattcgatggcgcgccgctttt

SEQ ID NO: 40 - DNA, 2445 bp, Escherichia coli
  CDS (1)..(2445)
atgatgattttgagtattctcgctacggttgtcctgctcggcgcgttgttctatcaccgcgtgagcttatttatcagcagtctgattttgctcgcctggacagccgccctcggcgttgctggtctgtggtcggcgtgggtactggtgcctctggccattatcctcgtgccatttaactttgcgcctatgcgtaagtcgatgatttccgcgccggtatttcgcggtttccgtaaggtgatgccgccgatgtcgcgcactgagaaagaagcgattgatgcgggcaccacctggtgggagggcgacttgttccagggcaagccggactggaaaaagctgcataactatccgcagccgcgcctgaccgccgaagagcaagcgtttctcgacggcccggtagaagaagcctgccggatggcgaatgatttccagatcacccatgagctggcggatctgccgccggagttgtgggcgtaccttaaagagcatcgtttcttcgcgatgatcatcaaaaaagagtacggcgggctggagttctcggcttatgcccagtctcgcgtgctgcaaaaactctccggcgtgagcgggatcctggcgattaccgtcggcgtgccaaactcattaggcccgggcgaactgttgcaacattacggcactgacgagcagaaagatcactatctgccgcgtctggcgcgtggtcaggagatcccctgctttgcactgaccagcccggaagcgggttccgatgcgggcgcgattccggacaccgggattgtctgcatgggcgaatggcagggccagcaggtgctggggatgcgtctgacctggaacaaacgctacattacgctggcaccgattgcgaccgtgcttgggctggcgtttaaactctccgacccggaaaaattactcggcggtgcagaagatttaggcattacctgtgcgctgatcccaaccaccacgccgggcgtggaaattggtcgtcgccacttcccgctgaacgtaccgttccagaacggaccgacgcgcggtaaagatgtcttcgtgccgatcgattacatcatcggcgggccgaaaatggccgggcaaggctggcggatgctggtggagtgcctctcggtaggccgcggcatcaccctgccttccaactcaaccggcggcgtgaaatcggtagcgctggcaaccggcgcgtatgctcacattcgccgtcagttcaaaatctctattggtaagatggaagggattgaagagccgctggcgcgtattgccggtaatgcctacgtgatggatgctgcggcatcgctgattacctacggcattatgctcggcgaaaaacctgccgtgctgtcggctatcgttaagtatcactgtacccaccgcgggcagcagtcgattattgatgcgatggatattaccggcggtaaaggcattatgctcgggcaaagcaacttcctggcgcgtgcttaccagggcgcaccgattgccatcaccgttgaaggggctaacattctgacccgcagcatgatgatcttcggacaaggagcgattcgttgccatccgtacgtgctggaagagatggaagcggcgaagaacaatgacgtcaacgcgttcgataaactgttgttcaaacatatcggtcacgtcggtagcaacaaagttcgcagcttctggctgggcctgacgcgcggtttaaccagcagcacgccaaccggcgatgccactaaacgctactatcagcacctgaaccgcctgagcgccaacctcgccctgctttctgatgtctcgatggcagtgctgggcggcagcctgaaacgtcgcgagcgcatctcggcccgtctgggggatattttaagccagctctacctcgcctctgccgtgctgaagcgttatgacgacgaaggccgtaatgaagccgacctgccgctggtgcactggggcgtacaagatgcgctgtatcaggctgaacaggcgatggatgatttactgcaaaacttcccgaaccgcgtggttgccgggctgctgaatgtggtgatcttcccgaccggacgtcattatctggcaccttctgacaagctggatcataaagtggcgaagattttacaagtgccgaacgccacccgttcccgcattggtcgcggtcagtacctgacgccgagcgagcataatccggttggcttgctggaagaggcgctggtggatgtgattgccgccgacccaattcatcagcggatctgtaaagagctgggtaaaaacctgccgtttacccgtctggatgaactggcgcacaacgcgctggtgaaggggctgattgataaagatgaagccgctattctggtgaaagctgaagaaagccgtctgcgcagtattaacgttgatgactttgatccggaagagctggcgacgaagccggtaaagttgccggagaaagtgcggaaagttgaagccgcgtaa

SEQ ID NO: 41 - protein, 814 aa, Escherichia coli [sequence omitted]

SEQ ID NO: 42 - DNA, 1377 bp, Acinetobacter sp. ADP1
  CDS (1)..(1377)
atgcgtcctctgcacccgatcgacttcatttttctgtcgctggagaagcgccagcagcctatgcatgtcggtggcctgttcttgtttcaaattccggataatgcgccggacacctttatccaagacctggtgaatgatatccgcattagcaaatctattccggtcccgccattcaacaacaaactgaacggcctgttttgggacgaggacgaggaatttgatctggatcaccattttcgtcacatcgcattgccgcacccaggtcgtattcgtgaactgctgatctacattagccaagagcacagcaccttgctggatcgcgccaagccgctgtggacgtgcaacattattgagggcattgaaggtaatcgttttgcgatgtatttcaagattcaccacgcgatggttgatggtgttgctggtatgcgtctgatcgaaaagagcctgtctcacgatgtgaccgagaaaagcatcgtgccgccgtggtgtgtggagggtaagcgtgctaaacgcctgcgtgaaccgaaaacgggtaagatcaaaaagattatgtccggtatcaaatctcagctgcaagcaactccgaccgtgatccaggaactgtcccagaccgtctttaaggacatcggtcgcaaccctgatcacgtcagcagcttccaggcaccgtgctccattctgaatcagcgtgtcagcagcagccgtcgctttgcggcgcaaagcttcgacctggatcgcttccgtaacatcgccaaaagcctgaatgtcaccattaacgacgttgttctggcggtgtgttccggcgctctgcgtgcgtacctgatgagccataatagcctgccgagcaaaccgttgattgcgatggtgccggcaagcattcgtaatgacgacagcgacgttagcaaccgtattacgatgatcctggcgaatctggcaacccataaagatgatccattgcagcgtctggaaatcattcgtcgcagcgtccaaaacagcaagcagcgtttcaagcgcatgacgagcgaccagatcctgaactattcggccgtggtttacggtccggcaggcctgaacatcatcagcggtatgatgccgaaacgtcaagcgttcaatctggttatttctaacgtcccgggtccgcgcgagccgttgtattggaatggcgcgaaactggatgctctgtacccggccagcattgttctggatggtcaggccctgaatatcaccatgacgtcctacttggacaagttggaggttggcctgatcgcgtgccgcaatgccctgccgcgtatgcagaacttgctgacccatctggaggaagagatccaactgttcgaaggcgtgattgcaaagcaagaggacatcaaaacggcgaactaa

SEQ ID NO: 43 - protein, 458 aa, Acinetobacter sp. ADP1
MRPLHPIDFIFLSLEKRQQPMHVGGLFLFQIPDNAPDTFIQDLVNDIRISKSIPVPPFNNKLNGLFWDEDEEFDLDHHFRHIALPHPGRIRELLIYISQEHSTLLDRAKPLWTCNIIEGIEGNRFAMYFKIHHAMVDGVAGMRLIEKSLSHDVTEKSIVPPWCVEGKRAKRLREPKTGKIKKIMSGIKSQLQATPTVIQELSQTVFKDIGRNPDHVSSFQAPCSILNQRVSSSRRFAAQSFDLDRFRNIAKSLNVTINDVVLAVCSGALRAYLMSHNSLPSKPLIAMVPASIRNDDSDVSNRITMILANLATHKDDPLQRLEIIRRSVQNSKQRFKRMTSDQILNYSAVVYGPAGLNIISGMMPKRQAFNLVISNVPGPREPLYWNGAKLDALYPASIVLDGQALNITMTSYLDKLEVGLIACRNALPRMQNLLTHLEEEIQLFEGVIAKQEDIKTAN

SEQ ID NO: 44 - DNA, 1374 bp, Alkanivorax borkumensis SK2
  CDS (1)..(1374)
atgaaagcgctgtccccggtggatcagctgttcctgtggctggagaaacgtcagcaaccgatgcatgttggtggtctgcagctgtttagcttcccagagggtgcgggtcctaagtacgttagcgagttggctcagcaaatgcgtgactactgtcacccggtggccccgttcaatcagcgcctgacccgtcgcctgggtcaatactattggacgcgcgacaaacaatttgacattgaccaccattttcgccatgaagcgctgccgaagccgggtcgcattcgcgaactgctgtccttggttagcgcggagcacagcaatctgttggaccgcgagcgccctatgtgggaagcgcacctgattgagggcatccgtggccgccaattcgctttgtactataagatccaccatagcgtgatggatggcatcagcgctatgcgcattgcgtctaaaacgctgagcaccgacccgtctgagcgcgaaatggcaccagcatgggccttcaataccaagaaacgtagccgtagcctgccttccaatccagttgatatggcgagcagcatggcccgtctgacggcttctatcagcaaacaggcggcgaccgttccgggtctggctcgtgaagtgtacaaggtcacccagaaagctaagaaggatgagaactacgtgagcatttttcaagcgccggataccatcttgaacaacaccattaccggttcccgtcgttttgcagcacagagctttccgctgccgcgtctgaaagttatcgcgaaggcgtataactgcaccatcaacaccgtcgtcctgtctatgtgtggccacgcgctgcgtgaatatctgattagccaacacgcactgccggatgagccgctgatcgcgatggtgccgatgagcctgcgtcaggacgacagcacgggtggtaatcagattggcatgatcctggccaacctgggcacccatatctgcgatccggcgaatcgtttgcgtgttattcacgactccgtcgaggaagcgaaatcgcgtttcagccagatgagcccggaggagatcctgaactttaccgcactgactatggccccgacgggcttgaatctgctgaccggcctggcaccgaaatggcgtgcgttcaacgtcgtcattagcaacattccgggtccgaaggaaccgctgtattggaatggcgcccagctgcaaggtgtgtacccggtaagcattgcgttggaccgtattgcactgaacatcacgctgactagctacgtggatcagatggagttcggtctgatcgcatgccgtcgcacgctgccgagcatgcaacgtctgctggattatctggaacaaagcattcgtgagttggaaatcggtgccggcatcaagtaa

SEQ ID NO: 45 - protein, 457 aa, Alkanivorax borkumensis SK2
MKALSPVDQLFLWLEKRQQPMHVGGLQLFSFPEGAGPKYVSELAQQMRDYCHPVAPFNQRLTRRLGQYYWTRDKQFDIDHHFRHEALPKPGRIRELLSLVSAEHSNLLDRERPMWEAHLIEGIRGRQFALYYKIHHSVMDGISAMRIASKTLSTDPSEREMAPAWAFNTKKRSRSLPSNPVDMASSMARLTASISKQAATVPGLAREVYKVTQKAKKDENYVSIFQAPDTILNNTITGSRRFAAQSFPLPRLKVIAKAYNCTINTVVLSMCGHALREYLISQHALPDEPLIAMVPMSLRQDDSTGGNQIGMILANLGTHICDPANRLRVIHDSVEEAKSRFSQMSPEEILNFTALTMAPTGLNLLTGLAPKWRAFNVVISNIPGPKEPLYWNGAQLQGVYPVSIALDRIALNITLTSYVDQMEFGLIACRRTLPSMQRLLDYLEQSIRELEIGAGIK

SEQ ID NO: 46 - DNA, 3087 bp, Artificial Sequence
  Synthetic Expression Cassette
atgcgtcctctgcacccgatcgacttcatttttctgtcgctggagaagcgccagcagcctatgcatgtcggtggcctgttcttgtttcaaattccggataatgcgccggacacctttatccaagacctggtgaatgatatccgcattagcaaatctattccggtcccgccattcaacaacaaactgaacggcctgttttgggacgaggacgaggaatttgatctggatcaccattttcgtcacatcgcattgccgcacccaggtcgtattcgtgaactgctgatctacattagccaagagcacagcaccttgctggatcgcgccaagccgctgtggacgtgcaacattattgagggcattgaaggtaatcgttttgcgatgtatttcaagattcaccacgcgatggttgatggtgttgctggtatgcgtctgatcgaaaagagcctgtctcacgatgtgaccgagaaaagcatcgtgccgccgtggtgtgtggagggtaagcgtgctaaacgcctgcgtgaaccgaaaacgggtaagatcaaaaagattatgtccggtatcaaatctcagctgcaagcaactccgaccgtgatccaggaactgtcccagaccgtctttaaggacatcggtcgcaaccctgatcacgtcagcagcttccaggcaccgtgctccattctgaatcagcgtgtcagcagcagccgtcgctttgcggcgcaaagcttcgacctggatcgcttccgtaacatcgccaaaagcctgaatgtcaccattaacgacgttgttctggcggtgtgttccggcgctctgcgtgcgtacctgatgagccataatagcctgccgagcaaaccgttgattgcgatggtgccggcaagcattcgtaatgacgacagcgacgttagcaaccgtattacgatgatcctggcgaatctggcaacccataaagatgatccattgcagcgtctggaaatcattcgtcgcagcgtccaaaacagcaagcagcgtttcaagcgcatgacgagcgaccagatcctgaactattcggccgtggtttacggtccggcaggcctgaacatcatcagcggtatgatgccgaaacgtcaagcgttcaatctggttatttctaacgtcccgggtccgcgcgagccgttgtattggaatggcgcgaaactggatgctctgtacccggccagcattgttctggatggtcaggccctgaatatcaccatgacgtcctacttggacaagttggaggttggcctgatcgcgtgccgcaatgccctgccgcgtatgcagaacttgctgacccatctggaggaagagatccaactgttcgaaggcgtgattgcaaagcaagaggacatcaaaacggcgaactaagcgttaagtctgagaggtgaagaattgaagaaggtttggcttaaccgttatcccgcggacgttccgacggagatcaaccctgaccgttatcaatctctggtagatatgtttgagcagtcggtcgcgcgctacgccgatcaacctgcgtttgtgaatatgggggaggtaatgaccttccgcaagctggaagaacgcagtcgcgcgtttgccgcttatttgcaacaagggttggggctgaagaaaggcgatcgcgttgcgttgatgatgcctaatttattgcaatatccggtggcgctgtttggcattttgcgtgccgggatgatcgtcgtaaacgttaacccgttgtataccccgcgtgagcttgagcatcagcttaacgatagcggcgcatcggcgattgttatcgtgtctaactttgctcacacactggaaaaagtggttgataaaaccgccgttcagcacgtaattctgacccgtatgggcgatcagctatctacggcaaaaggcacggtagtcaatttcgttgttaaatacatcaagcgtttggtgccgaaataccatctgccagatgccatttcatttcgtagcgcactgcataacggctaccggatgcagtacgtcaaacccgaactggtgccggaagatttagcttttctgcaatacaccggcggcaccactggtgtggcgaaaggcgcgatgctgactcaccgcaatatgctggcgaacctggaacaggttaacgcgacctatggtccgctgttgcatccgggcaaagagctggtggtgacggcgctgccgctgtatcacatttttgccctgaccattaactgcctgctgtttatcgaactgggtgggcagaacctgcttatcactaacccgcgcgatattccagggttggtaaaagagttagcgaaatatccgtttaccgctatcacgggcgttaacaccttgttcaatgcgttgctgaacaataaagagttccagcagctggatttctccagtctgcatctttccgcaggcggtgggatgccagtgcagcaagtggtggcagagcgttgggtgaaactgaccggacagtatctgctggaaggctatggccttaccgagtgtgcgccgctggtcagcgttaacccatatgatattgattatcatagtggtagcatcggtttgccggtgccgtcgacggaagccaaactggtggatgatgatgataatgaagtaccaccaggtcaaccgggtgagctttgtgtcaaaggaccgcaggtgatgctgggttactggcagcgtcccgatgctaccgatgaaatcatcaaaaatggctggttacacaccggcgacatcgcggtaatggatgaagaaggattcctgcgcattgtcgatcgtaaaaaagacatgattctggtttccggttttaacgtctatcccaacgagattgaagatgtcgtcatgcagcatcctggcgtacaggaagtcgcggctgttggcgtaccttccggctccagtggtgaagcggtgaaaatcttcgtagtgaaaaaagatccatcgcttaccgaagagtcactggtgactttttgccgccgtcagctcacgggatacaaagtaccgaagctggtggagtttcgtgatgagttaccgaaatctaacgtcggaaaaattttgcgacgagaattacgtgacgaagcgcgcggcaaagtggacaataaagcctga

SEQ ID NO: 47 - DNA, 3084 bp, Artificial Sequence
  Synthetic Expression Cassette
atgaaagcgctgtccccggtggatcagctgttcctgtggctggagaaacgtcagcaaccgatgcatgttggtggtctgcagctgtttagcttcccagagggtgcgggtcctaagtacgttagcgagttggctcagcaaatgcgtgactactgtcacccggtggccccgttcaatcagcgcctgacccgtcgcctgggtcaatactattggacgcgcgacaaacaatttgacattgaccaccattttcgccatgaagcgctgccgaagccgggtcgcattcgcgaactgctgtccttggttagcgcggagcacagcaatctgttggaccgcgagcgccctatgtgggaagcgcacctgattgagggcatccgtggccgccaattcgctttgtactataagatccaccatagcgtgatggatggcatcagcgctatgcgcattgcgtctaaaacgctgagcaccgacccgtctgagcgcgaaatggcaccagcatgggccttcaataccaagaaacgtagccgtagcctgccttccaatccagttgatatggcgagcagcatggcccgtctgacggcttctatcagcaaacaggcggcgaccgttccgggtctggctcgtgaagtgtacaaggtcacccagaaagctaagaaggatgagaactacgtgagcatttttcaagcgccggataccatcttgaacaacaccattaccggttcccgtcgttttgcagcacagagctttccgctgccgcgtctgaaagttatcgcgaaggcgtataactgcaccatcaacaccgtcgtcctgtctatgtgtggccacgcgctgcgtgaatatctgattagccaacacgcactgccggatgagccgctgatcgcgatggtgccgatgagcctgcgtcaggacgacagcacgggtggtaatcagattggcatgatcctggccaacctgggcacccatatctgcgatccggcgaatcgtttgcgtgttattcacgactccgtcgaggaagcgaaatcgcgtttcagccagatgagcccggaggagatcctgaactttaccgcactgactatggccccgacgggcttgaatctgctgaccggcctggcaccgaaatggcgtgcgttcaacgtcgtcattagcaacattccgggtccgaaggaaccgctgtattggaatggcgcccagctgcaaggtgtgtacccggtaagcattgcgttggaccgtattgcactgaacatcacgctgactagctacgtggatcagatggagttcggtctgatcgcatgccgtcgcacgctgccgagcatgcaacgtctgctggattatctggaacaaagcattcgtgagttggaaatcggtgccggcatcaagtaagcgttaagtctgagaggtgaagaattgaagaaggtttggcttaaccgttatcccgcggacgttccgacggagatcaaccctgaccgttatcaatctctggtagatatgtttgagcagtcggtcgcgcgctacgccgatcaacctgcgtttgtgaatatgggggaggtaatgaccttccgcaagctggaagaacgcagtcgcgcgtttgccgcttatttgcaacaagggttggggctgaagaaaggcgatcgcgttgcgttgatgatgcctaatttattgcaatatccggtggcgctgtttggcattttgcgtgccgggatgatcgtcgtaaacgttaacccgttgtataccccgcgtgagcttgagcatcagcttaacgatagcggcgcatcggcgattgttatcgtgtctaactttgctcacacactggaaaaagtggttgataaaaccgccgttcagcacgtaattctgacccgtatgggcgatcagctatctacggcaaaaggcacggtagtcaatttcgttgttaaatacatcaagcgtttggtgccgaaataccatctgccagatgccatttcatttcgtagcgcactgcataacggctaccggatgcagtacgtcaaacccgaactggtgccggaagatttagcttttctgcaatacaccggcggcaccactggtgtggcgaaaggcgcgatgctgactcaccgcaatatgctggcgaacctggaacaggttaacgcgacctatggtccgctgttgcatccgggcaaagagctggtggtgacggcgctgccgctgtatcacatttttgccctgaccattaactgcctgctgtttatcgaactgggtgggcagaacctgcttatcactaacccgcgcgatattccagggttggtaaaagagttagcgaaatatccgtttaccgctatcacgggcgttaacaccttgttcaatgcgttgctgaacaataaagagttccagcagctggatttctccagtctgcatctttccgcaggcggtgggatgccagtgcagcaagtggtggcagagcgttgggtgaaactgaccggacagtatctgctggaaggctatggccttaccgagtgtgcgccgctggtcagcgttaacccatatgatattgattatcatagtggtagcatcggtttgccggtgccgtcgacggaagccaaactggtggatgatgatgataatgaagtaccaccaggtcaaccgggtgagctttgtgtcaaaggaccgcaggtgatgctgggttactggcagcgtcccgatgctaccgatgaaatcatcaaaaatggctggttacacaccggcgacatcgcggtaatggatgaagaaggattcctgcgcattgtcgatcgtaaaaaagacatgattctggtttccggttttaacgtctatcccaacgagattgaagatgtcgtcatgcagcatcctggcgtacaggaagtcgcggctgttggcgtaccttccggctccagtggtgaagcggtgaaaatcttcgtagtgaaaaaagatccatcgcttaccgaagagtcactggtgactttttgccgccgtcagctcacgggatacaaagtaccgaagctggtggagtttcgtgatgagttaccgaaatctaacgtcggaaaaattttgcgacgagaattacgtgacgaagcgcgcggcaaagtggacaataaagcctga

SEQ ID NO: 48 - DNA, 7141 bp, Artificial Sequence
  Synthetic vector
cgggatctcgacgctctcccttatgcgactcctgcgtttagggaaagagcatttgtcagaatatttaagggcgcctgtcactttgcttgatatatgagaattatttaaccttataaatgagaaaaaagcaacgcactttaaataagatacgttgctttttcgattgatgaacacctataattaaactattcatctattatttatgattttttgtatatacaatatttctagtttgttaaagagaattaagaaaataaatctcgaaaataataaagggaaaatcagtttttgatatcaaaattatacatgtcaacgataatacaaaatataatacaaactataagatgttatcagtatttattatgcatttagaataccttttgtgtcgcccttattcgactccctatagaagttcctattctctagaaagtataggaacttcccttcattttggatccaattgtgagcggataacaattacgagcttcatgcacagtgatcgacgctgttgacaattaatcatcggctcgtataatgtgtggatgtggaattgtgagcgctcacaattccacaacggtttccctctagaaataattttgtttaacaggaggtaaaacatatgcgtcctctgcacccgatcgacttcatttttctgtcgctggagaagcgccagcagcctatgcatgtcggtggcctgttcttgtttcaaattccggataatgcgccggacacctttatccaagacctggtgaatgatatccgcattagcaaatctattccggtcccgccattcaacaacaaactgaacggcctgttttgggacgaggacgaggaatttgatctggatcaccattttcgtcacatcgcattgccgcacccaggtcgtattcgtgaactgctgatctacattagccaagagcacagcaccttgctggatcgcgccaagccgctgtggacgtgcaacattattgagggcattgaaggtaatcgttttgcgatgtatttcaagattcaccacgcgatggttgatggtgttgctggtatgcgtctgatcgaaaagagcctgtctcacgatgtgaccgagaaaagcatcgtgccgccgtggtgtgtggagggtaagcgtgctaaacgcctgcgtgaaccgaaaacgggtaagatcaaaaagattatgtccggtatcaaatctcagctgcaagcaactccgaccgtgatccaggaactgtcccagaccgtctttaaggacatcggtcgcaaccctgatcacgtcagcagcttccaggcaccgtgctccattctgaatcagcgtgtcagcagcagccgtcgctttgcggcgcaaagcttcgacctggatcgcttccgtaacatcgccaaaagcctgaatgtcaccattaacgacgttgttctggcggtgtgttccggcgctctgcgtgcgtacctgatgagccataatagcctgccgagcaaaccgttgattgcgatggtgccggcaagcattcgtaatgacgacagcgacgttagcaaccgtattacgatgatcctggcgaatctggcaacccataaagatgatccattgcagcgtctggaaatcattcgtcgcagcgtccaaaacagcaagcagcgtttcaagcgcatgacgagcgaccagatcctgaactattcggccgtggtttacggtccggcaggcctgaacatcatcagcggtatgatgccgaaacgtcaagcgttcaatctggttatttctaacgtcccgggtccgcgcgagccgttgtattggaatggcgcgaaactggatgctctgtacccggccagcattgttctggatggtcaggccctgaatatcaccatgacgtcctacttggacaagttggaggttggcctgatcgcgtgccgcaatgccctgccgcgtatgcagaacttgctgacccatctggaggaagagatccaactgttcgaaggcgtgattgcaaagcaagaggacatcaaaacggcgaactaagcgttaagtctgagaggtgaagaattgaagaaggtttggcttaaccgttatcccgcggacgttccgacggagatcaaccctgaccgttatcaatctctggtagatatgtttgagcagtcggtcgcgcgctacgccgatcaacctgcgtttgtgaatatgggggaggtaatgaccttccgcaagctggaagaacgcagtcgcgcgtttgccgcttatttgcaacaagggttggggctgaagaaaggcgatcgcgttgcgttgatgatgcctaatttattgcaatatccggtggcgctgtttggcattttgcgtgccgggatgatcgtcgtaaacgttaacccgttgtataccccgcgtgagcttgagcatcagcttaacgatagcggcgcatcggcgattgttatcgtgtctaactttgctcacacactggaaaaagtggttgataaaaccgccgttcagcacgtaattctgacccgtatgggcgatcagctatctacggcaaaaggcacggtagtcaatttcgttgttaaatacatcaagcgtttggtgccgaaataccatctgccagatgccatttcatttcgtagcgcactgcataacggctaccggatgcagtacgtcaaacccgaactggtgccggaagatttagcttttctgcaatacaccggcggcaccactggtgtggcgaaaggcgcgatgctgactcaccgcaatatgctggcgaacctggaacaggttaacgcgacctatggtccgctgttgcatccgggcaaagagctggtggtgacggcgctgccgctgtatcacatttttgccctgaccattaactgcctgctgtttatcgaactgggtgggcagaacctgcttatcactaacccgcgcgatattccagggttggtaaaagagttagcgaaatatccgtttaccgctatcacgggcgttaacaccttgttcaatgcgttgctgaacaataaagagttccagcagctggatttctccagtctgcatctttccgcaggcggtgggatgccagtgcagcaagtggtggcagagcgttgggtgaaactgaccggacagtatctgctggaaggctatggccttaccgagtgtgcgccgctggtcagcgttaacccatatgatattgattatcatagtggtagcatcggtttgccggtgccgtcgacggaagccaaactggtggatgatgatgataatgaagtaccaccaggtcaaccgggtgagctttgtgtcaaaggaccgcaggtgatgctgggttactggcagcgtcccgatgctaccgatgaaatcatcaaaaatggctggttacacaccggcgacatcgcggtaatggatgaagaaggattcctgcgcattgtcgatcgtaaaaaagacatgattctggtttccggttttaacgtctatcccaacgagattgaagatgtcgtcatgcagcatcctggcgtacaggaagtcgcggctgttggcgtaccttccggctccagtggtgaagcggtgaaaatcttcgtagtgaaaaaagatccatcgcttaccgaagagtcactggtgactttttgccgccgtcagctcacgggatacaaagtaccgaagctggtggagtttcgtgatgagttaccgaaatctaacgtcggaaaaattttgcgacgagaattacgtgacgaagcgcgcggcaaagtggacaataaagcctgagcgttaagtcagtcgtcagacgccggttaatccggcgttttttttgacgcccactaaagagaaaacaatctcgagtctggtaaagaaaccgctgctgcgaaatttgaacgccagcacatggactcgtctactagcgcagcttaattaacctaggctgctgccaccgctgagcaataactagcataaccccttggggcctctaaacgggtcttgaggggttttttgctgaaacctcaggcatttgagaagcacacggtcacactgcttccggtagtcaataaaccggtaaaccagcaatagacataagcggctatttaacgaccctgccctgaaccgacgaccgggtcatcgtggccggatcttgcggcccctcggcttgaacgaattgttagacattatttgccgactaccttggtgatctcgcctttcacgtagtggacaaattcttccaactgatctgcgcgcgaggccaagcgatcttcttcttgtccaagataagcctgtctagcttcaagtatgacgggctgatactgggccggcaggcgctccattgcccagtcggcagcgacatccttcggcgcgattttgccggttactgcgctgtaccaaatgcgggacaacgtaagcactacatttcgctcatcgccagcccagtcgggcggcgagttccatagcgttaaggtttcatttagcgcctcaaatagatcctgttcaggaaccggatcaaagagttcctccgccgctggacctaccaaggcaacgctatgttctcttgcttttgtcagcaagatagccagatcaatgtcgatcgtggctggctcgaagatacctgcaagaatgtcattgcgctgccattctccaaattgcagttcgcgcttagctggataacgccacggaatgatgtcgtcgtgcacaacaatggtgacttctacagcgcggagaatctcgctctctccaggggaagccgaagtttccaaaaggtcgttgatcaaagctcgccgcgttgtttcatcaagccttacggtcaccgtaaccagcaaatcaatatcactgtgtggcttcaggccgccatccactgcggagccgtacaaatgtacggccagcaacgtcggttcgagatggcgctcgatgacgccaactacctctgatagttgagtcgatacttcggcgatcaccgcttccctcatactcttcctttttcaatattattgaagcatttatcagggttattgtctcatgagcggatacatatttgaatgtatttagaaaaataaacaaatagctagctcactcggtcgctacgctccgggcgtgagactgcggcgggcgctgcggacacatacaaagttacccacagattccgtggataagcaggggactaacatgtgaggcaaaacagcagggccgcgccggtggcgtttttccataggctccgccctcctgccagagttcacataaacagacgcttttccggtgcatctgtgggagccgtgaggctcaaccatgaatctgacagtacgggcgaaacccgacaggacttaaagatccccaccgtttccggcgggtcgctccctcttgcgctctcctgttccgaccctgccgtttaccggatacctgttccgcctttctcccttacgggaagtgtggcgctttctcatagctcacacactggtatctcggctcggtgtaggtcgttcgctccaagctgggctgtaagcaagaactccccgttcagcccgactgctgcgccttatccggtaactgttcacttgagtccaacccggaaaagcacggtaaaacgccactggcagcagccattggtaactgggagttcgcagaggatttgtttagctaaacacgcggttgctcttgaagtgtgcgccaaagtccggctacactggaaggacagatttggttgctgtgctctgcgaaagccagttaccacggttaagcagttccccaactgacttaaccttcgatcaaaccacctccccaggtggttttttcgtttacagggcaaaagattacgcgcagaaaaaaaggatctcaagaagatcctttgatcttttctactgaaccgctctagatttcagtgcaatttatctcttcaaatgtagcacctgaagtcagccccatacgatataagttgtaattctcatgttagtcatgccccgcgcccaccggaaggagctgactgggttgaaggctctcaagggcatcggtcgagatcccggtgcctaatgagtgagctaacttacattaattgcgttgcgctcactgcccgctttccagtcgggaaacctgtcgtgccagctgcattaatgaatcggccaacgcgcggggagaggcggtttgcgtattgggcgccagggtggtttttcttttcaccagtgagacgggcaacagctgattgcccttcaccgcctggccctgagagagttgcagcaagcggtccacgctggtttgccccagcaggcgaaaatcctgtttgatggtggttaacggcgggatataacatgagctgtcttcggtatcgtcgtatcccactaccgagatgtccgcaccaacgcgcagcccggactcggtaatggcgcgcattgcgcccagcgccatctgatcgttggcaaccagcatcgcagtgggaacgatgccctcattcagcatttgcatggtttgttgaaaaccggacatggcactccagtcgccttcccgttccgctatcggctgaatttgattgcgagtgagatatttatgccagccagccagacgcagacgcgccgagacagaacttaatgggcccgctaacagcgcgatttgctggtgacccaatgcgaccagatgctccacgcccagtcgcgtaccgtcttcatgggagaaaataatactgttgatgggtgtctggtcagagacatcaagaaataacgccggaacattagtgcaggcagcttccacagcaatggcatcctggtcatccagcggatagttaatgatcagcccactgacgcgttgcgcgagaagattgtgcaccgccgctttacaggcttcgacgccgcttcgttctaccatcgacaccaccacgctggcacccagttgatcggcgcgagatttaatcgccgcgacaatttgcgacggcgcgtgcagggccagactggaggtggcaacgccaatcagcaacgactgtttgcccgccagttgttgtgccacgcggttgggaatgtaattcagctccgccatcgccgcttccactttttcccgcgttttcgcagaaacgtggctggcctggttcaccacgcgggaaacggtctgataagagacaccggcatactctgcgacatcgtataacgttactggtttcacattcaccaccctgaattgactctcttccgggcgctatcatgccataccgcgaaaggttttgcgccattcgatggtgtc

SEQ ID NO: 49 - DNA, 7138 bp, Artificial Sequence
  Synthetic vector
cgggatctcgacgctctcccttatgcgactcctgcgtttagggaaagagcatttgtcagaatatttaagggcgcctgtcactttgcttgatatatgagaattatttaaccttataaatgagaaaaaagcaacgcactttaaataagatacgttgctttttcgattgatgaacacctataattaaactattcatctattatttatgattttttgtatatacaatatttctagtttgttaaagagaattaagaaaataaatctcgaaaataataaagggaaaatcagtttttgatatcaaaattatacatgtcaacgataatacaaaatataatacaaactataagatgttatcagtatttattatgcatttagaataccttttgtgtcgcccttattcgactccctatagaagttcctattctctagaaagtataggaacttcccttcattttggatccaattgtgagcggataacaattacgagcttcatgcacagtgatcgacgctgttgacaattaatcatcggctcgtataatgtgtggatgtggaattgtgagcgctcacaattccacaacggtttccctctagaaataattttgtttaacaggaggtaaaacatatgaaagcgctgtccccggtggatcagctgttcctgtggctggagaaacgtcagcaaccgatgcatgttggtggtctgcagctgtttagcttcccagagggtgcgggtcctaagtacgttagcgagttggctcagcaaatgcgtgactactgtcacccggtggccccgttcaatcagcgcctgacccgtcgcctgggtcaatactattggacgcgcgacaaacaatttgacattgaccaccattttcgccatgaagcgctgccgaagccgggtcgcattcgcgaactgctgtccttggttagcgcggagcacagcaatctgttggaccgcgagcgccctatgtgggaagcgcacctgattgagggcatccgtggccgccaattcgctttgtactataagatccaccatagcgtgatggatggcatcagcgctatgcgcattgcgtctaaaacgctgagcaccgacccgtctgagcgcgaaatggcaccagcatgggccttcaataccaagaaacgtagccgtagcctgccttccaatccagttgatatggcgagcagcatggcccgtctgacggcttctatcagcaaacaggcggcgaccgttccgggtctggctcgtgaagtgtacaaggtcacccagaaagctaagaaggatgagaactacgtgagcatttttcaagcgccggataccatcttgaacaacaccattaccggttcccgtcgttttgcagcacagagctttccgctgccgcgtctgaaagttatcgcgaaggcgtataactgcaccatcaacaccgtcgtcctgtctatgtgtggccacgcgctgcgtgaatatctgattagccaacacgcactgccggatgagccgctgatcgcgatggtgccgatgagcctgcgtcaggacgacagcacgggtggtaatcagattggcatgatcctggccaacctgggcacccatatctgcgatccggcgaatcgtttgcgtgttattcacgactccgtcgaggaagcgaaatcgcgtttcagccagatgagcccggaggagatcctgaactttaccgcactgactatggccccgacgggcttgaatctgctgaccggcctggcaccgaaatggcgtgcgttcaacgtcgtcattagcaacattccgggtccgaaggaaccgctgtattggaatggcgcccagctgcaaggtgtgtacccggtaagcattgcgttggaccgtattgcactgaacatcacgctgactagctacgtggatcagatggagttcggtctgatcgcatgccgtcgcacgctgccgagcatgcaacgtctgctggattatctggaacaaagcattcgtgagttggaaatcggtgccggcatcaagtaagcgttaagtctgagaggtgaagaattgaagaaggtttggcttaaccgttatcccgcggacgttccgacggagatcaaccctgaccgttatcaatctctggtagatatgtttgagcagtcggtcgcgcgctacgccgatcaacctgcgtttgtgaatatgggggaggtaatgaccttccgcaagctggaagaacgcagtcgcgcgtttgccgcttatttgcaacaagggttggggctgaagaaaggcgatcgcgttgcgttgatgatgcctaatttattgcaatatccggtggcgctgtttggcattttgcgtgccgggatgatcgtcgtaaacgttaacccgttgtataccccgcgtgagcttgagcatcagcttaacgatagcggcgcatcggcgattgttatcgtgtctaactttgctcacacactggaaaaagtggttgataaaaccgccgttcagcacgtaattctgacccgtatgggcgatcagctatctacggcaaaaggcacggtagtcaatttcgttgttaaatacatcaagcgtttggtgccgaaataccatctgccagatgccatttcatttcgtagcgcactgcataacggctaccggatgcagtacgtcaaacccgaactggtgccggaagatttagcttttctgcaatacaccggcggcaccactggtgtggcgaaaggcgcgatgctgactcaccgcaatatgctggcgaacctggaacaggttaacgcgacctatggtccgctgttgcatccgggcaaagagctggtggtgacggcgctgccgctgtatcacatttttgccctgaccattaactgcctgctgtttatcgaactgggtgggcagaacctgcttatcactaacccgcgcgatattccagggttggtaaaagagttagcgaaatatccgtttaccgctatcacgggcgttaacaccttgttcaatgcgttgctgaacaataaagagttccagcagctggatttctccagtctgcatctttccgcaggcggtgggatgccagtgcagcaagtggtggcagagcgttgggtgaaactgaccggacagtatctgctggaaggctatggccttaccgagtgtgcgccgctggtcagcgttaacccatatgatattgattatcatagtggtagcatcggtttgccggtgccgtcgacggaagccaaactggtggatgatgatgataatgaagtaccaccaggtcaaccgggtgagctttgtgtcaaaggaccgcaggtgatgctgggttactggcagcgtcccgatgctaccgatgaaatcatcaaaaatggctggttacacaccggcgacatcgcggtaatggatgaagaaggattcctgcgcattgtcgatcgtaaaaaagacatgattctggtttccggttttaacgtctatcccaacgagattgaagatgtcgtcatgcagcatcctggcgtacaggaagtcgcggctgttggcgtaccttccggctccagtggtgaagcggtgaaaatcttcgtagtgaaaaaagatccatcgcttaccgaagagtcactggtgactttttgccgccgtcagctcacgggatacaaagtaccgaagctggtggagtttcgtgatgagttaccgaaatctaacgtcggaaaaattttgcgacgagaattacgtgacgaagcgcgcggcaaagtggacaataaagcctgagcgttaagtcagtcgtcagacgccggttaatccggcgttttttttgacgcccactaaagagaaaacaatctcgagtctggtaaagaaaccgctgctgcgaaatttgaacgccagcacatggactcgtctactagcgcagcttaattaacctaggctgctgccaccgctgagcaataactagcataaccccttggggcctctaaacgggtcttgaggggttttttgctgaaacctcaggcatttgagaagcacacggtcacactgcttccggtagtcaataaaccggtaaaccagcaatagacataagcggctatttaacgaccctgccctgaaccgacgaccgggtcatcgtggccggatcttgcggcccctcggcttgaacgaattgttagacattatttgccgactaccttggtgatctcgcctttcacgtagtggacaaattcttccaactgatctgcgcgcgaggccaagcgatcttcttcttgtccaagataagcctgtctagcttcaagtatgacgggctgatactgggccggcaggcgctccattgcccagtcggcagcgacatccttcggcgcgattttgccggttactgcgctgtaccaaatgcgggacaacgtaagcactacatttcgctcatcgccagcccagtcgggcggcgagttccatagcgttaaggtttcatttagcgcctcaaatagatcctgttcaggaaccggatcaaagagttcctccgccgctggacctaccaaggcaacgctatgttctcttgcttttgtcagcaagatagccagatcaatgtcgatcgtggctggctcgaagatacctgcaagaatgtcattgcgctgccattctccaaattgcagttcgcgcttagctggataacgccacggaatgatgtcgtcgtgcacaacaatggtgacttctacagcgcggagaatctcgctctctccaggggaagccgaagtttccaaaaggtcgttgatcaaagctcgccgcgttgtttcatcaagccttacggtcaccgtaaccagcaaatcaatatcactgtgtggcttcaggccgccatccactgcggagccgtacaaatgtacggccagcaacgtcggttcgagatggcgctcgatgacgccaactacctctgatagttgagtcgatacttcggcgatcaccgcttccctcatactcttcctttttcaatattattgaagcatttatcagggttattgtctcatgagcggatacatatttgaatgtatttagaaaaataaacaaatagctagctcactcggtcgctacgctccgggcgtgagactgcggcgggcgctgcggacacatacaaagttacccacagattccgtggataagcaggggactaacatgtgaggcaaaacagcagggccgcgccggtggcgtttttccataggctccgccctcctgccagagttcacataaacagacgcttttccggtgcatctgtgggagccgtgaggctcaaccatgaatctgacagtacgggcgaaacccgacaggacttaaagatccccaccgtttccggcgggtcgctccctcttgcgctctcctgttccgaccctgccgtttaccggatacctgttccgcctttctcccttacgggaagtgtggcgctttctcatagctcacacactggtatctcggctcggtgtaggtcgttcgctccaagctgggctgtaagcaagaactccccgttcagcccgactgctgcgccttatccggtaactgttcacttgagtccaacccggaaaagcacggtaaaacgccactggcagcagccattggtaactgggagttcgcagaggatttgtttagctaaacacgcggttgctcttgaagtgtgcgccaaagtccggctacactggaaggacagatttggttgctgtgctctgcgaaagccagttaccacggttaagcagttccccaactgacttaaccttcgatcaaaccacctccccaggtggttttttcgtttacagggcaaaagattacgcgcagaaaaaaaggatctcaagaagatcctttgatcttttctactgaaccgctctagatttcagtgcaatttatctcttcaaatgtagcacctgaagtcagccccatacgatataagttgtaattctcatgttagtcatgccccgcgcccaccggaaggagctgactgggttgaaggctctcaagggcatcggtcgagatcccggtgcctaatgagtgagctaacttacattaattgcgttgcgctcactgcccgctttccagtcgggaaacctgtcgtgccagctgcattaatgaatcggccaacgcgcggggagaggcggtttgcgtattgggcgccagggtggtttttcttttcaccagtgagacgggcaacagctgattgcccttcaccgcctggccctgagagagttgcagcaagcggtccacgctggtttgccccagcaggcgaaaatcctgtttgatggtggttaacggcgggatataacatgagctgtcttcggtatcgtcgtatcccactaccgagatgtccgcaccaacgcgcagcccggactcggtaatggcgcgcattgcgcccagcgccatctgatcgttggcaaccagcatcgcagtgggaacgatgccctcattcagcatttgcatggtttgttgaaaaccggacatggcactccagtcgccttcccgttccgctatcggctgaatttgattgcgagtgagatatttatgccagccagccagacgcagacgcgccgagacagaacttaatgggcccgctaacagcgcgatttgctggtgacccaatgcgaccagatgctccacgcccagtcgcgtaccgtcttcatgggagaaaataatactgttgatgggtgtctggtcagagacatcaagaaataacgccggaacattagtgcaggcagcttccacagcaatggcatcctggtcatccagcggatagttaatgatcagcccactgacgcgttgcgcgagaagattgtgcaccgccgctttacaggcttcgacgccgcttcgttctaccatcgacaccaccacgctggcacccagttgatcggcgcgagatttaatcgccgcgacaatttgcgacggcgcgtgcagggccagactggaggtggcaacgccaatcagcaacgactgtttgcccgccagttgttgtgccacgcggttgggaatgtaattcagctccgccatcgccgcttccactttttcccgcgttttcgcagaaacgtggctggcctggttcaccacgcgggaaacggtctgataagagacaccggcatactctgcgacatcgtataacgttactggtttcacattcaccaccctgaattgactctcttccgggcgctatcatgccataccgcgaaaggttttgcgccattcgatggtgtc

SEQ ID NO: 50 - DNA, 7316 bp, Artificial Sequence; identical to SEQ ID NO: 30
  Synthetic vector

SEQ ID NO: 51 - DNA, 34 bp, Artificial Sequence
  Synthetic primer
acaggaggtaaaacatatgcgtcctctgcacccg

SEQ ID NO: 52 - DNA, 44 bp, Artificial Sequence
  Synthetic primer
gtttctttaccagactcgagattgttttctctttagtgggcgtc

SEQ ID NO: 53 - DNA, 32 bp, Artificial Sequence
  Synthetic primer
acaggaggtaaaacatatgaaagcgctgtccc

SEQ ID NO: 54 - DNA, 41 bp, Artificial Sequence
  Synthetic primer
gtttctttaccagactcgagattgttttctctttagtgggc

SEQ ID NO: 55 - DNA, 1016 bp, Artificial Sequence
  Synthetic vector
gcggccgcaacgtcagaaatagcaatcgccgggtagcccggacggttttcacggtagcgaccggtcaactcttcggcaaagtgcatagcgtcgcaatgggaaccgccgttgccgcaggaaagcactttgccaccggctttaaagctgtctgctaacaggaccgccgcgcgctgaatggcgtgaatattggcgtcatcttttaaaaagttagccagcgtttccgccgcttcgttcagttcgttacgaataagatcctggtacatgaggatatccttcagcataaatgtaatagacaaaatgcagtgtaccggataccgccaaaagcgagaagtacgggcaggtgctatgaccaggactttttgacctgaagtgcggataaaaacagcaacaatgtgagctttgttgtaattatattgtaaacatattgctaaatgtttttacatccactacaaccatatcatcacaagtggtcagacctcctacaagtaaggggcttttcgttatgatgcggaaagttgaagccgcgtaaatgaataacggagccgaaaggctccgtttctttatccgctaattatttaaaattaaagccatccggatggttttccaggctgccggtcaacgccgcgaacaacaccgttttaccatcaatcgaaagcgcatcgttcacattcagccaggtgagtttctcttgcgacgttttctcatcaatagtcgagaacagccccgtcatctgattagatttctcggaccacatcacagcgatacgttgcgagccacagtcatgcggtttgcacgcgctcatcacctgatacgtctcatctcccaacgttacggtttgtgcgggagtataagtaccgcctttcatcacccaggcaggcagcttatgcccttgtaccatctgattaaatgcagctttggtggtttcgccctttgcaaggctgctaatggttaaatcatcctgcgccattgcactggtggcgatgaccagagcggcgactgtcgttattggcggccgc

SEQ ID NO: 56 - DNA, 6647 bp, Artificial Sequence
  Synthetic vector
ccctttcgtcttcgaataaatacctgtgacggaagatcacttcgcagaataaataaatcctggtgtccctgttgataccgggaagccctgggccaacttttggcgaaaatgagacgttgatcggcacgtaagaggttccaactttcaccataatgaaataagatcactaccgggcgtattttttgagttatcgagattttcaggagctaaggaagctaaaatggagaaaaaaatcactggatataccaccgttgatatatcccaatggcatcgtaaagaacattttgaggcatttcagtcagttgctcaatgtacctataaccagaccgttcagctggatattacggcctttttaaagaccgtaaagaaaaataagcacaagttttatccggcctttattcacattcttgcccgcctgatgaatgctcatccggaattccgtatggcaatgaaagacggtgagctggtgatatgggatagtgttcacccttgttacaccgttttccatgagcaaactgaaacgttttcatcgctctggagtgaataccacgacgatttccggcagtttctacacatatattcgcaagatgtggcgtgttacggtgaaaacctggcctatttccctaaagggtttattgagaatatgtttttcgtctcagccaatccctgggtgagtttcaccagttttgatttaaacgtggccaatatggacaacttcttcgcccccgttttcaccatgggcaaatattatacgcaaggcgacaaggtgctgatgccgctggcgattcaggttcatcatgccgtttgtgatggcttccatgtcggcagaatgcttaatgaattacaacagtactgcgatgagtggcagggcggggcgtaatttttttaaggcagttattggtgcccttaaacgcctggttgctacgcctgaataagtgataataagcggatgaatggcagaaattcgaaagcaaattcgacccggtcgtcggttcagggcagggtcgttaaatagccgcttatgtctattgctggtctcggtacccggggatcgcggccgcaacgtcagaaatagcaatcgccgggtagcccggacggttttcacggtagcgaccggtcaactcttcggcaaagtgcatagcgtcgcaatgggaaccgccgttgccgcaggaaagcactttgccaccggctttaaagctgtctgctaacaggaccgccgcgcgctgaatggcgtgaatattggcgtcatcttttaaaaagttagccagcgtttccgccgcttcgttcagttcgttacgaataagatcctggtacatgaggatatccttcagcataaatgtaatagacaaaatgcagtgtaccggataccgccaaaagcgagaagtacgggcaggtgctatgaccaggactttttgacctgaagtgcggataaaaacagcaacaatgtgagctttgttgtaattatattgtaaacatattgctaaatgtttttacatccactacaaccatatcatcacaagtggtcagacctcctacaagtaaggggcttttcgttatgatgcggaaagttgaagccgcgtaaatgaataacggagccgaaaggctccgtttctttatccgctaattatttaaaattaaagccatccggatggttttccaggctgccggtcaacgccgcgaacaacaccgttttaccatcaatcgaaagcgcatcgttcacattcagccaggtgagtttctcttgcgacgttttctcatcaatagtcgagaacagccccgtcatctgattagatttctcggaccacatcacagcgatacgttgcgagccacagtcatgcggtttgcacgcgctcatcacctgatacgtctcatctcccaacgttacggtttgtgcgggagtataagtaccgcctttcatcacccaggcaggcagcttatgcccttgtaccatctgattaaatgcagctttggtggtttcgccctttgcaaggctgctaatggttaaatcatcctgcgccattgcactggtggcgatgaccagagcggcgactgtcgttattggcggccgcgatcctctagagtcgaccggtggcgaatgggacgcgccctgtagcggcgcattaagcgcggcgggtgtggtggttacgcgcagcgtgaccgctacacttgccagcgccctagcgcccgctcctttcgctttcttcccttcctttctcgccacgttcgccggctttccccgtcaagctctaaatcgggggctccctttagggttccgatttagtgctttacggcacctcgaccccaaaaaacttgattagggtgatggttcacgtagtgggccatcgccctgatagacggtttttcgccctttgacgttggagtccacgttctttaatagtggactcttgttccaaactggaacaacactcaaccctatctcggtctattcttttgatttataagggattttgccgatttcggcctattggttaaaaaatgagctgatttaacaaaaatttaacgcgaattttaacaaaatattaacgcttacaatttaggtggcacttttcggggaaatgtgcgcggaacccctatttgtttatttttctaaatacattcaaatatgtatccgctcaccgcgatcctttttaacccatcacatatacctgccgttcactattatttagtgaaatgagatattatgatattttctgaattgtgattaaaaaggcaactttatgcccatgcaacagaaactataaaaaatacagagaatgaaaagaaacagatagattttttagttctttaggcccgtagtctgcaaatccttttatgattttctatcaaacaaaagaggaaaatagaccagttgcaatccaaacgagagtctaatagaatgaggtcgaaaagtaaatcgcgcgggtttgttactgataaagcaggcaagacctaaaatgtgtaaagggcaaagtgtatactttggcgtcaccccttacatattttaggtctttttttattgtgcgtaactaacttgccatcttcaaacaggagggctggaagaagcagaccgctaacacagtacataaaaaaggagacatgaacgatgaacatcaaaaagtttgcaaaacaagcaacagtattaacctttactaccgcactgctggcaggaggcgcaactcaagcgtttgcgaaagaaacgaaccaaaagccatataaggaaacatacggcatttcccatattacacgccatgatatgctgcaaatccctgaacagcaaaaaaatgaaaaatatcaagttcctgattcgtccacaattaaaaatatctcttctgcaaaaggcctggacgtttgggacagctggccattacaaaacgctgacggcactgtcgcaaactatcacggctaccacatcgtctttgcattagccggagatcctaaaaatgcggatgacacatcgatttacatgttctatcaaaaagtcggcgaaacttctattgacagctggaaaaacgctggccgcgtctttaaagacagcgacaaattcgatgcaaatgattctatcctaaaagaccaaacacaagaatggtcaggttcagccacatttacatctgacggaaaaatccgtttattctacactgatttctccggtaaacattacggcaaacaaacactgacaactgcacaagttaacgtatcagcatcagacagctctttgaacatcaacggtgtagaggattataaatcaatctttgacggtgacggaaaaacgtatcaaaatgtacagcagttcatcgatgaaggcaactacagctcaggcgacaaccatacgctgagagatcctcactacgtagaagataaaggccacaaatacttagtatttgaagcaaacactggaactgaagatggctaccaaggcgaagaatctttatttaacaaagcatactatggcaaaagcacatcattcttccgtcaagaaagtcaaaaacttctgcaaagcgataaaaaacgcacggctgagttagcaaacggcgctctcggtatgattgagctaaacgatgattacacactgaaaaaagtgatgaaaccgctgattgcatctaacacagtaacagatgaaattgaacgcgcgaacgtctttaaaatgaacggcaaatggtacctgttcactgactcccgcggatcaaaaatgacgattgacggcattacgtctaacgatatttacatgcttggttatgtttctaattctttaactggcccatacaagccgctgaacaaaactggccttgtgttaaaaatggatcttgatcctaacgatgtaacctttacttactcacacttcgctgtacctcaagcgaaaggaaacaatgtcgtgattacaagctatatgacaaacagaggattctacgcagacaaacaatcaacgtttgcgccaagcttcctgctgaacatcaaaggcaagaaaacatctgttgtcaaagacagcatccttgaacaaggacaattaacagttaacaaataaaaacgcaaaagaaaatgccgatccggtttattgactaccggaagcagtgtgaccgtgtgcttctcaaatgcctcaggctgtctatgtgtgactgttgagctgtaacaagttgtctcaggtgttcaatttcatgttctagttgctttgttttactggtttcacctgttctattaggtgttacatgctgttcatctgttacattgtcgatctgttcatggtgaacagctttaaatgcaccaaaaactcgtaaaagctctgatgtatctatcttttttacaccgttttcatctgtgcatatggacagttttccctttgatatctaacggtgaacagttgttctacttttgtttgttagtcttgatgcttcactgatagatacaagagccataagaacctcagatccttccgtatttagccagtatgttctctagtgtggttcgttgtttttgcgtgagccatgagaacgaaccattgagatcatgcttactttgcatgtcactcaaaaattttgcctcaaaactggtgagctgaatttttgcagttaaagcatcgtgtagtgtttttcttagtccgttacgtaggtaggaatctgatgtaatggttgttggtattttgtcaccattcatttttatctggttgttctcaagttcggttacgagatccatttgtctatctagttcaacttggaaaatcaacgtatcagtcgggcggcctcgcttatcaaccaccaatttcatattgctgtaagtgtttaaatctttacttattggtttcaaaacccattggttaagccttttaaactcatggtagttattttcaagcattaacatgaacttaaattcatcaaggctaatctctatatttgccttgtgagttttcttttgtgttagttcttttaataaccactcataaatcctcatagagtatttgttttcaaaagacttaacatgttccagattatattttatgaatttttttaactggaaaagataaggcaatatctcttcactaaaaactaattctaatttttcgcttgagaacttggcatagtttgtccactggaaaatctcaaagcctttaaccaaaggattcctgatttccacagttctcgtcatcagctctctggttgctttagctaatacaccataagcattttccctactgatgttcatcatctgagcgtattggttataagtgaacgataccgtccgttctttccttgtagggttttcaatcgtggggttgagtagtgccacacagcataaaattagcttggtttcatgctccgttaagtcatagcgactaatcgctagttcatttgctttgaaaacaactaattcagacatacatctcaattggtctaggtgattttaatcactataccaattgagatgggctagtcaatgataattactagtccttttcctttgagttgtgggtatctgtaaattctgctagacctttgctggaaaacttgtaaattctgctagaccctctgtaaattccgctagacctttgtgtgttttttttgtttatattcaagtggttataatttatagaataaagaaagaataaaaaaagataaaaagaatagatcccagccctgtgtataactcactactttagtcagttccgcagtattacaaaaggatgtcgcaaacgctgtttgctcctctacaaaacagaccttaaaaccctaaaggcttaagtagcaccctcgcaagctcgggcaaatcgctgaatattccttttgtctccgaccatcaggcacctgagtcgctgtctttttcgtgacattcagttcgctgcgctcacggctctggcagtgaatgggggtaaatggcactacaggcgccttttatggattcatgcaaggaaactacccataatacaagaaaagcccgtcacgggcttctcagggcgttttatggcgggtctgctatgtggtgctatctgactttttgctgttcagcagttcctgccctctgattttccagtctgaccacttcggattatcccgtgacaggtcattcagactggctaatgcacccagtaaggcagcggtatcatcaacaggcttacccgtcttactgtcggatcgacgctctcccttatgcgactcctgcat

SEQ ID NO: 57 - DNA, 24 bp, Artificial Sequence
  Synthetic vector
atgcggaaagttgaagccgcgtaa

SEQ ID NO: 58 - DNA, 918 bp, Cuphea hookeriana
  CDS (1)..(918)
atgcacgaccgcaaatccaaacgcccggacatgctggtagactcgtttggtctggaaagcacggtccaggacggcctggtgtttcgtcaatcctttagcatccgcagctacgagattggcacggatcgtaccgcgagcatcgaaaccctgatgaaccacctgcaggaaaccagcttgaaccactgtaaatctaccggtatcctgttggatggtttcggtcgcaccctggagatgtgtaagcgtgatttgatttgggtggtgattaagatgcagatcaaagttaaccgttacccggcctggggtgacaccgttgagattaacacgcgtttcagccgtctgggtaagattggtatgggtcgcgactggctgattagcgattgcaatacgggcgaaatcctggtgcgtgcgaccagcgcgtatgccatgatgaatcagaaaactcgtcgcctgagcaagctgccgtacgaggtgcatcaggaaatcgtccctctgttcgttgactctccggttatcgaggatagcgatctgaaggtccataagttcaaggttaagaccggtgacagcatccaaaaaggcttgaccccaggctggaacgatctggatgtgaatcaacatgtcagcaacgtcaaatacattggctggattctggagagcatgccgaccgaggtcctggaaacgcaggagctgtgcagcctggctctggaatatcgtcgcgagtgcggccgtgacagcgttttggaaagcgtgacggcgatggacccgtccaaagttggtgtgcgtagccaatatcaacacctgctgcgtctggaggatggtactgcaatcgtcaatggtgcaaccgagtggcgtccgaaaaatgcaggtgcgaatggtgctattagcaccggcaagacgtctaatggcaacagcgtttcctaa

SEQ ID NO: 59 - protein, 305 aa, Cuphea hookeriana
MHDRKSKRPDMLVDSFGLESTVQDGLVFRQSFSIRSYEIGTDRTASIETLMNHLQETSLNHCKSTGILLDGFGRTLEMCKRDLIWVVIKMQIKVNRYPAWGDTVEINTRFSRLGKIGMGRDWLISDCNTGEILVRATSAYAMMNQKTRRLSKLPYEVHQEIVPLFVDSPVIEDSDLKVHKFKVKTGDSIQKGLTPGWNDLDVNQHVSNVKYIGWILESMPTEVLETQELCSLALEYRRECGRDSVLESVTAMDPSKVGVRSQYQHLLRLEDGTAIVNGATEWRPKNAGANGAISTGKTSNGNSVS

SEQ ID NO: 60 - DNA, 984 bp, Cocos nucifera
  CDS (1)..(984)
ttgccagactggagcatgttgttggccgctattcgtacgatcttttccgcagccgaaaaacagtggaccctgctggatagcaagaaacgcggtgcggatgcagttgcggacgcgtctggcgtgggcaagatggtgaaaaacggtctggtctaccgtcagaatttcagcatccgtagctatgagattggtgtggacaagcgtgcgagcgttgaggctctgatgaatcattttcaagaaacgagcttgaatcactgcaaatgcatcggtctgatgcatggcggttttggttgcaccccggaaatgacgcgtcgtaatctgatctgggtcgttgccaagatgctggttcacgtggagcgttatccgtggtggggtgacgtagtgcagattaacacctggattagcagcagcggtaagaacggcatgggtcgcgactggcacgtgcacgactgtcagacgggcctgccgattatgcgtggcacctctgtgtgggtcatgatggataaacacactcgccgtctgagcaagctgccggaagaggttcgcgcagaaatcaccccgttcttcagcgaacgcgacgcggtcctggatgataacggccgtaaactgccgaaatttgacgatgatagcgcggcacacgtccgccgtggtttgacccctcgttggcatgatttcgacgtcaatcagcatgtcaacaacgtgaaatacgtcggttggattctggagagcgttccggtttggatgctggacggttacgaggttgccactatgtctctggaatatcgtcgcgagtgtcgtatggatagcgtggttcagtccctgaccgcggttagctcggatcacgcggacggcagcccgatcgtttgtcaacacctgctgcgcctggaagatggtacggagatcgtgcgtggtcaaaccgagtggcgtccgaagcaacaagcacgcgacctgggcaatatgggtttgcatccgaccgagtccaagtaa

SEQ ID NO: 61 - protein, 327 aa, Cocos nucifera
LPDWSMLLAAIRTIFSAAEKQWTLLDSKKRGADAVADASGVGKMVKNGLVYRQNFSIRSYEIGVDKRASVEALMNHFQETSLNHCKCIGLMHGGFGCTPEMTRRNLIWVVAKMLVHVERYPWWGDVVQINTWISSSGKNGMGRDWHVHDCQTGLPIMRGTSVWVMMDKHTRRLSKLPEEVRAEITPFFSERDAVLDDNGRKLPKFDDDSAAHVRRGLTPRWHDFDVNQHVNNVKYVGWILESVPVWMLDGYEVATMSLEYRRECRMDSVVQSLTAVSSDHADGSPIVCQHLLRLEDGTEIVRGQTEWRPKQQARDLGNMGLHPTESK

SEQ ID NO: 62 - DNA, 741 bp, Clostridium perfringens
  CDS (1)..(741)
atggggaaagcttatgaaaaagtttatgaagttacttatggagaaacagatggaagaaaagactgtagaataacttcaatgatgaacttcttttcagactgttgcttaagtcaagaagaaaagaattcaatgaactatgcagataatagcagtgaaactacttgggtattttttgattatgaaataatagttaatagatatccaagatatagagagaaaattaaggtaaaaacttatgttgaatctataagaaagttttattctaacagagtatttgaggcttatgatatggatggggccttagtagctagggctgatgtattagccttcttaataaacaaaaaaactagaagaccagctagaataagcgatgaagaatatgagattcatggattaagtaaggagtcttcaaaattattaagaaaaaaattaaactttgagaaatttgataaagaagatttagagatgaattttcacataagatatttagatatagatctaaatatgcatgtaagtaatattaagtatgtagagtggattttagaaacagtaccagttgatattgttctaaattacaaaatgaaaaaaataaaaataaaatttgaaaaagaaattacatatggtcataatgtaattataaagtcaaaaataattaagggtgaagatgaagtaaaggttcttcataaagtagaaaatgaagagggagaaagcattactttagcagaaacttattggtattaa

SEQ ID NO: 63 - protein, 246 aa, Clostridium perfringens
MGKAYEKVYEVTYGETDGRKDCRITSMMNFFSDCCLSQEEKNSMNYADNSSETTWVFFDYEIIVNRYPRYREKIKVKTYVESIRKFYSNRVFEAYDMDGALVARADVLAFLINKKTRRPARISDEEYEIHGLSKESSKLLRKKLNFEKFDKEDLEMNFHIRYLDIDLNMHVSNIKYVEWILETVPVDIVLNYKMKKIKIKFEKEITYGHNVIIKSKIIKGEDEVKVLHKVENEEGESITLAETYWY

SEQ ID NO: 64 - DNA, 1164 bp, Escherichia coli
  CDS (1)..(1164)
atggaacaggttgtcattgtcgatgcaattcgcaccccgatgggccgttcgaagggcggtgcttttcgtaacgtgcgtgcagaagatctctccgctcatttaatgcgtagcctgctggcgcgtaacccggcgctggaagcggcggccctcgacgatatttactggggttgtgtgcagcagacgctggagcagggttttaatatcgcccgtaacgcggcgctgctggcagaagtaccacactctgtcccggcggttaccgttaatcgcttgtgtggttcatccatgcaggcactgcatgacgcagcacgaatgatcatgactggcgatgcgcaggcatgtctggttggcggcgtggagcatatgggccatgtgccgatgagtcacggcgtcgattttcaccccggcctgagccgcaatgtcgccaaagcggcgggcatgatgggcttaacggcagaaatgctggcgcgtatgcacggtatcagccgtgaaatgcaggatgcctttgccgcgcggtcacacgcccgcgcctgggccgccacgcagtcggccgcatttaaaaatgaaatcatcccgaccggtggtcacgatgccgacggcgtcctgaagcagtttaattacgacgaagtgattcgcccggaaaccaccgtggaagccctcgccacgctgcgtccggcgtttgatccagtaaacggtatggtaacggcgggcacatcttctgcactttccgatggcgcagctgccatgctggtgatgagtgaaagccgcgcccatgaattaggtcttaagccgcgcgctcgtgtgcgttcgatggcggtcgttggttgtgacccatcgattatgggttacggcccggttccggcctcgaaactggcgctgaaaaaagcggggctttctgccagcgatatcggcgtgtttgaaatgaacgaagcctttgccgcgcagatcctgccatgtattaaagatctgggactaattgagcagattgacgagaagatcaacctcaacggtggcgcgatcgcgctgggtcatccgctgggttgttccggtgcgcgtatcagcaccacgctgctgaatctgatggaacgcaaagacgttcagtttggtctggcgacgatgtgtatcggtctgggtcagggtattgcgacggtgtttgagcgggtttaa

SEQ ID NO: 65 - protein, 387 aa, Escherichia coli
MEQVVIVDAIRTPMGRSKGGAFRNVRAEDLSAHLMRSLLARNPALEAAALDDIYWGCVQQTLEQGFNIARNAALLAEVPHSVPAVTVNRLCGSSMQALHDAARMIMTGDAQACLVGGVEHMGHVPMSHGVDFHPGLSRNVAKAAGMMGLTAEMLARMHGISREMQDAFAARSHARAWAATQSAAFKNEIIPTGGHDADGVLKQFNYDEVIRPETTVEALATLRPAFDPVNGMVTAGTSSALSDGAAAMLVMSESRAHELGLKPRARVRSMAVVGCDPSIMGYGPVPASKLALKKAGLSASDIGVFEMNEAFAAQILPCIKDLGLIEQIDEKINLNGGAIALGHPLGCSGARISTTLLNLMERKDVQFGLATMCIGLGQGIATVFERV

SEQ ID NO: 66 - DNA, 2190 bp, Escherichia coli
  CDS (1)..(2190)
atgctttacaaaggcgacaccctgtaccttgactggctggaagatggcattgccgaactggtatttgatgccccaggttcagttaataaactcgacactgcgaccgtcgccagcctcggcgaggccatcggcgtgctggaacagcaatcagatctaaaagggctgctgctgcgttcgaacaaagcagcctttatcgtcggtgctgatatcaccgaatttttgtccctgttcctcgttcctgaagaacagttaagtcagtggctgcactttgccaatagcgtgtttaatcgcctggaagatctgccggtgccgaccattgctgccgtcaatggctatgcgctgggcggtggctgcgaatgcgtgctggcgaccgattatcgtctggcgacgccggatctgcgcatcggtctgccggaaaccaaactgggcatcatgcctggctttggcggttctgtacgtatgccacgtatgctgggcgctgacagtgcgctggaaatcattgccgccggtaaagatgtcggcgcggatcaggcgctgaaaatcggtctggtggatggcgtagtcaaagcagaaaaactggttgaaggcgcaaaggcggttttacgccaggccattaacggcgacctcgactggaaagcaaaacgtcagccgaagctggaaccactaaaactgagcaagattgaagccaccatgagcttcaccatcgctaaagggatggtcgcacaaacagcggggaaacattatccggcccccatcaccgcagtaaaaaccattgaagctgcggcccgttttggtcgtgaagaagccttaaacctggaaaacaaaagttttgtcccgctggcgcataccaacgaagcccgcgcactggtcggcattttccttaacgatcaatatgtaaaaggcaaagcgaagaaactcaccaaagacgttgaaaccccgaaacaggccgcggtgctgggtgcaggcattatgggcggcggcatcgcttaccagtctgcgtggaaaggcgtgccggttgtcatgaaagatatcaacgacaagtcgttaaccctcggcatgaccgaagccgcgaaactgctgaacaagcagcttgagcgcggcaagatcgatggtctgaaactggctggcgtgatctccacaatccacccaacgctcgactacgccggatttgaccgcgtggatattgtggtagaagcggttgttgaaaacccgaaagtgaaaaaagccgtactggcagaaaccgaacaaaaagtacgccaggataccgtgctggcgtctaacacttcaaccattcctatcagcgaactggccaacgcgctggaacgcccggaaaacttctgcgggatgcacttctttaacccggtccaccgaatgccgttggtagaaattattcgcggcgagaaaagctccgacgaaaccatcgcgaaagttgtcgcctgggcgagcaagatgggcaagacgccgattgtggttaacgactgccccggcttctttgttaaccgcgtgctgttcccgtatttcgccggtttcagccagctgctgcgcgacggcgcggatttccgcaagatcgacaaagtgatggaaaaacagtttggctggccgatgggcccggcatatctgctggacgttgtgggcattgataccgcgcatcacgctcaggctgtcatggcagcaggcttcccgcagcggatgcagaaagattaccgcgatgccatcgacgcgctgtttgatgccaaccgctttggtcagaagaacggcctcggtttctggcgttataaagaagacagcaaaggtaagccgaagaaagaagaagacgccgccgttgaagacctgctggcagaagtgagccagccgaagcgcgatttcagcgaagaagagattatcgcccgcatgatgatcccgatggtcaacgaagtggtgcgctgtctggaggaaggcattatcgccactccggcggaagcggatatggcgctggtctacggcctgggcttccctccgttccacggcggcgcgttccgctggctggacaccctcggtagcgcaaaatacctcgatatggcacagcaatatcagcacctcggcccgctgtatgaagtgccggaaggtctgcgtaataaagcgcgtcataacgaaccgtactatcctccggttgagccagcccgtccggttggcgacctgaaaacggcttaa

SEQ ID NO: 67 - protein, 729 aa, Escherichia coli
MLYKGDTLYLDWLEDGIAELVFDAPGSVNKLDTATVASLGEAIGVLEQQSDLKGLLLRSNKAAFIVGADITEFLSLFLVPEEQLSQWLHFANSVFNRLEDLPVPTIAAVNGYALGGGCECVLATDYRLATPDLRIGLPETKLGIMPGFGGSVRMPRMLGADSALEIIAAGKDVGADQALKIGLVDGVVKAEKLVEGAKAVLRQAINGDLDWKAKRQPKLEPLKLSKIEATMSFTIAKGMVAQTAGKHYPAPITAVKTIEAAARFGREEALNLENKSFVPLAHTNEARALVGIFLNDQYVKGKAKKLTKDVETPKQAAVLGAGIMGGGIAYQSAWKGVPVVMKDINDKSLTLGMTEAAKLLNKQLERGKIDGLKLAGVISTIHPTLDYAGFDRVDIVVEAVVENPKVKKAVLAETEQKVRQDTVLASNTSTIPISELANALERPENFCGMHFFNPVHRMPLVEIIRGEKSSDETIAKVVAWASKMGKTPIVVNDCPGFFVNRVLFPYFAGFSQLLRDGADFRKIDKVMEKQFGWPMGPAYLLDVVGIDTAHHAQAVMAAGFPQRMQKDYRDAIDALFDANRFGQKNGLGFWRYKEDSKGKPKKEEDAAVEDLLAEVSQPKRDFSEEEIIARMMIPMVNEVVRCLEEGIIATPAEADMALVYGLGFPPFHGGAFRWLDTLGSAKYLDMAQQYQHLGPLYEVPEGLRNKARHNEPYYPPVEPARPVGDLKTA

SEQ ID NO: 68 - DNA, 1341 bp, Escherichia coli
  CDS (1)..(1341)
atgagccagaaaaccctgtttacaaagtctgctctcgcagtcgcagtggcacttatctccacccaggcctggtcggcaggctttcagttaaacgaattttcttcctctggcctgggccgggcttattcaggggaaggcgcaattgccgatgatgcaggtaacgtcagccgtaaccccgcattgattactatgtttgaccgcccgacattttctgcgggtgcggtttatattgacccggatgtaaatatcagcggaacgtctccatctggtcgtagcctgaaagccgataacatcgcgcctacggcatgggttccgaacatgcactttgttgcaccgattaacgaccaatttggttggggcgcttctattacctctaactatggtctggctacagagtttaacgatacttatgcaggcggctctgtcgggggtacaaccgaccttgaaaccatgaacctgaacttaagcggtgcgtatcgcttaaataatgcatggagctttggtcttggtttcaacgccgtctacgctcgcgcgaaaattgaacgtttcgcaggcgatctggggcagttggttgctggccaaattatgcaatctcctgctggccaaactcagcaagggcaagcattggcagctaccgccaacggtattgacagtaataccaaaatcgctcatctgaacggtaaccagtggggctttggctggaacgccggaatcctgtatgaactggataaaaataaccgctatgcactgacctaccgttctgaagtgaaaattgacttcaaaggtaactacagcagcgatcttaatcgtgcgtttaataactacggtttgccaattcctaccgcgacaggtggcgcaacgcaatcgggttatctgacgctgaacctgcctgaaatgtgggaagtgtcaggttataaccgtgttgatccacagtgggcgattcactatagcctggcttacaccagctggagtcagttccagcagctgaaagcgacctcaaccagtggcgacacgctgttccagaaacatgaaggctttaaagatgcttaccgcatcgcgttgggtaccacttattactacgatgataactggaccttccgtaccggtatcgcctttgatgacagcccagttcctgcacagaatcgttctatctccattccggaccaggaccgtttctggctgagtgcaggtacgacttacgcatttaataaagatgcttcagtcgacgttggtgtttcttatatgcacggtcagagcgtgaaaattaacgaaggcccataccagttcgagtctgaaggtaaagcctggctgttcggtactaactttaactacgcgttctga

SEQ ID NO: 69 - protein, 446 aa, Escherichia coli
MSQKTLFTKSALAVAVALISTQAWSAGFQLNEFSSSGLGRAYSGEGAIADDAGNVSRNPALITMFDRPTFSAGAVYIDPDVNISGTSPSGRSLKADNIAPTAWVPNMHFVAPINDQFGWGASITSNYGLATEFNDTYAGGSVGGTTDLETMNLNLSGAYRLNNAWSFGLGFNAVYARAKIERFAGDLGQLVAGQIMQSPAGQTQQGQALAATANGIDSNTKIAHLNGNQWGFGWNAGILYELDKNNRYALTYRSEVKIDFKGNYSSDLNRAFNNYGLPIPTATGGATQSGYLTLNLPEMWEVSGYNRVDPQWAIHYSLAYTSWSQFQQLKATSTSGDTLFQKHEGFKDAYRIALGTTYYYDDNWTFRTGIAFDDSPVPAQNRSISIPDQDRFWLSAGTTYAFNKDASVDVGVSYMHGQSVKINEGPYQFESEGKAWLFGTNFNYAF

SEQ ID NO: 70 - DNA, 7970 bp, Artificial Sequence
  Synthetic vector
ctagattattaggcgaggccacgcgctttgagggtctgttcaaattcttcgaggcaacgttccgccacggcgagcatttcatccacttccgcacgggtcataacgagcggcggtgcagacacaatgtgatcgccgcacgcacgcataatgaggttgttgcgaaaaaaaatatcgcggcagagggtgccaatttcgccaaaatccggaaagagttcacgtttcgctttgtttttcacgagggtaaacgcctgcaccatgcccacgccacgcacatcatccacatgttcaaaacggctaaaggtttcacgccaacgtttctgcatatacgggccaatatcatctttcacacgctgcacaatgccttcatcacggagcgccgcaacattcgcatgcgccaccgccgcacacaccggatggccgctataggtaaagccatggttaaaatcaccgcccgcaatgagaccttccgcaacacgtttgcccacaaacaccgcgccaatcgggagatagccgctgctgaggcctttcgccgcggtaaagaggtccggctgaaagccaaaatgctgatggccaaaccattcgccggtacggccaaagccgcaaatcacttcatccgcaacgaggagcacatcatatttgcggcaaatacgttcaatttccggccaataggttgccggcggaacaatcacaccgcccgcaccctgaatcggttcgcccacaaacgccgccactttatccgcgccgatttcgagaattttttcttcgagccaacgcgccgcaaccacgccaaattcatccggggtcatatctttgccatgtttataccaccacggctgttcaatatgcgccatgcccggaatcgggagatcgccctgttcatgcatatatttcatgccgccgaggctcgcaccgccaatggtgctgccgtgatagccgttccaacggccaatgagggtttttttttccggtttgccctgcacatcccaataacgacgcaccatacgaatcatggtatccacgctttcgctgccgctgttggtataaaacacacgatcaaaacctgccggggtaacttcggcgaggaggctgctgagttccaccaccgccggatgggtggttttaaagaaggtgttataaaacgggagttcttccatctgacgacgcgccgcttccgcaaaatctttacggccatagcccacgttcacgcaccagaggcccgccatgccatcaataattttgttgccttcgctatcccagagatacacgccttcgccacgggtcatcacacgcgcacccgcctgattgaggctcgcggtatcggtaaacggatggagatgatgcgccgcatcgagttcacgccactgagaggtggtacgctgtttctgcatattatatctccttaaagctttaagcacccgccacagatgattcatcctgtaaagctttctcggcaggaacatactcatagcctagatctcttgctacagcttcataggtcacgtgtccgtttgcggtgtttaaacccgctctcagtgccgtattgtctgcgagcgcttttactgcccctttgttcgcgatttgcagcgcgtatggaacagtaacgttagtcagggcgattgttgatgtacgagggactgcgcctggcatgttcgctacagcataatgcacaaccccgtgtttttcatatgttggctgatcatgtgttgtgatatggtcgacagtttcgacgatgccgccttggtcgatcgctacatcaacaataactgaaccgggtttcatttgttttaccatttcctcagtgacaagagtcggagctttagcacccggaattaataccgcgcaaatgaggagatccgcttccgccacagcatcagcaatattgaccggattagaaattaacgttttaatctgatggccgaagatgtcatcaagctggcgcaagcggtctgcgtttaagtcaatgatcgtcacatctgcaccgaggccgacagccattttcgccgcgtttgtcccgacaacgcctcctccgataattgttacttttccgcgggaaacgccaggcaccccggcaagcagaatgccttttccgcctttaggcttttctaagaattgagcgccgatttgcgctgccattctgcccgcaacctctgacattggcgtcagaagaggcaatgtccggccttcactgaccgtttcatatgcgatggcagttactcctttatccttcaaggcctgtgcaagctcaggctcagctgctaaatgaaggtacgtaaacagcacaagtcctttgcgaaaataaacatattcttccggcagcggttcttttactttcatgaccatttcggcgtcccagacctgcttcggatcagcaatgatttccgctcctgctgactcataggcttcattttcaaatccgcttccaaggcccgcgcctgtttcaaccagcacccggtggccgtttgaaatgagctgagaaacgcccccgggtgttaatgcgacacggttttcattgttttttatctctttaggaacccctatgatcattatgccactctccttggttcctagatcctgtgtgaaattgttattgttatccgctcacaattccacacattatacgagccggaagcataaagtgtcaagcctggggtgcctaatgagtgagctaacttacattaattgcgttgcgctcactgcccgcatatctatgagccgggctgaatgatcgaccgagacaggccctgcggggctgcaggatccaattgtgagcggataacaattacgagcttcatgcacagtgatcgacgctgttgacaattaatcatcggctcgtataatgtgtggatgtggaattgtgagcgctcacaattccacaacggtttccctctagaaataattttgtttacaaggaggattataaaatgcacgaccgcaaatccaaacgcccggacatgctggtagactcgtttggtctggaaagcacggtccaggacggcctggtgtttcgtcaatcctttagcatccgcagctacgagattggcacggatcgtaccgcgagcatcgaaaccctgatgaaccacctgcaggaaaccagcttgaaccactgtaaatctaccggtatcctgttggatggtttcggtcgcaccctggagatgtgtaagcgtgatttgatttgggtggtgattaagatgcagatcaaagttaaccgttacccggcctggggtgacaccgttgagattaacacgcgtttcagccgtctgggtaagattggtatgggtcgcgactggctgattagcgattgcaatacgggcgaaatcctggtgcgtgcgaccagcgcgtatgccatgatgaatcagaaaactcgtcgcctgagcaagctgccgtacgaggtgcatcaggaaatcgtccctctgttcgttgactctccggttatcgaggatagcgatctgaaggtccataagttcaaggttaagaccggtgacagcatccaaaaaggcttgaccccaggctggaacgatctggatgtgaatcaacatgtcagcaacgtcaaatacattggctggattctggagagcatgccgaccgaggtcctggaaacgcaggagctgtgcagcctggctctggaatatcgtcgcgagtgcggccgtgacagcgttttggaaagcgtgacggcgatggacccgtccaaagttggtgtgcgtagccaatatcaacacctgctgcgtctggaggatggtactgcaatcgtcaatggtgcaaccgagtggcgtccgaaaaatgcaggtgcgaatggtgctattagcaccggcaagacgtctaatggcaacagcgtttcctaagctttagtcaaaagcctccggtcggaggcttttgactttctgcttactgaatttgcggccgcctcgagaaaatgaagggaagttcctatacttactagagaataggaacttctatagggagtcgaataagggcgacacaaaaggtattctaaatgcataataaatactgataacatcttatagtttgtattatattttgtattatcgttgacatgtataattttgatatcaaaaactgattttccctttattattttcgagatttattttcttaattctctttaacaaactagaaatattgtatatacaaaaaatcataaataatagatgaatagtttaattataggtgttcatcaatcgaaaaagcaacgtatcttatttaaagtgcgttgcttttttctcatttataaggttaaataattctcatatatcaagcaaagtgacaggcgcccttaaatattctgacaaatgctctttccctaaactccccccataaaaaaacccgccgaagcgggtttttacgttatttgcggattaacgattactcgttatcagaaccgcccaggatgcctggcagttccctactctcgccgctgcgctcggtcgttcggctgcgggacctcagcgctagcggagtgtatactggcttactatgttggcactgatgagggtgtcagtgaagtgcttcatgtggcaggagaaaaaaggctgcaccggtgcgtcagcagaatatgtgatacaggatatattccgcttcctcgctcactgactcgctacgctcggtcgttcgactgcggcgagcggaaatggcttacgaacggggcggagatttcctggaagatgccaggaagatacttaacagggaagtgagagggccgcggcaaagccgtttttccataggctccgcccccctgacaagcatcacgaaatctgacgctcaaatcagtggtggcgaaacccgacaggactataaagataccaggcgtttccccctggcggctccctcgtgcgctctcctgttcctgcctttcggtttaccggtgtcattccgctgttatggccgcgtttgtctcattccacgcctgacactcagttccgggtaggcagttcgctccaagctggactgtatgcacgaaccccccgttcagtccgaccgctgcgccttatccggtaactatcgtcttgagtccaacccggaaagacatgcaaaagcaccactggcagcagccactggtaattgatttagaggagttagtcttgaagtcatgcgccggttaaggctaaactgaaaggacaagttttggtgactgcgctcctccaagccagttacctcggttcaaagagttggtagctcagagaaccttcgaaaaaccgccctgcaaggcggttttttcgttttcagagcaagagattacgcgcagaccaaaacgatctcaagaagatcatcttattaatcactgcccgctttccagtcgggaaacctgtcgtgccagctgcattaatgaatcggccaacgcgcggggagaggcggtttgcgtattgggcgccagggtggtttttcttttcaccagtgagactggcaacagctgattgcccttcaccgcctggccctgagagagttgcagcaagcggtccacgctggtttgccccagcaggcgaaaatcctgtttgatggtggttaacggcgggatataacatgagctatcttcggtatcgtcgtatcccactaccgagatatccgcaccaacgcgcagcccggactcggtaatggcgcgcattgcgcccagcgccatctgatcgttggcaaccagcatcgcagtgggaacgatgccctcattcagcatttgcatggtttgttgaaaaccggacatggcactccagtcgccttcccgttccgctatcggctgaatttgattgcgagtgagatatttatgccagccagccagacgcagacgcgccgagacagaacttaatgggcccgctaacagcgcgatttgctggtgacccaatgcgaccagatgctccacgcccagtcgcgtaccgtcctcatgggagaaaataatactgttgatgggtgtctggtcagagacatcaagaaataacgccggaacattagtgcaggcagcttccacagcaatggcatcctggtcatccagcggatagttaatgatcagcccactgacgcgttgcgcgagaagattgtgcaccgccgctttacaggcttcgacgccgcttcgttctaccatcgacaccaccacgctggcacccagttgatcggcgcgagatttaatcgccgcgacaatttgcgacggcgcgtgcagggccagactggaggtggcaacgccaatcagcaacgactgtttgcccgccagttgttgtgccacgcggttgggaatgtaattcagctccgccatcgccgcttccactttttcccgcgttttcgcagaaacgtggctggcctggttcaccacgcgggaaacggtctgataagagacaccggcatactctgcgacatcgtataacgttactggtttcatattcaccaccctgaattgactctcttccgggcgctatcatgccataccgcgaaaggttttgcgccattcgatggcgcgccgcttttaccaatgcttaatcagtgaggcacctatctcagcgatctgtctatttcgttcatccatagttgcctgactccccgtcgtgtagataactacgatacgggagggcttaccatctggccccagcgctgcgatgataccgcgagaaccacgctcaccggctccggatttatcagcaataaaccagccagccggaagggccgagcgcagaagtggtcctgcaactttatccgcctccatccagtctattaattgttgccgggaagctagagtaagtagttcgccagttaatagtttgcgcaacgttgttgccatcgctacaggcatcgtggtgtcacgctcgtcgtttggtatggcttcattcagctccggttcccaacgatcaaggcgagttacatgatcccccatgttgtgcaaaaaagcggttagctccttcggtcctccgatcgttgtcagaagtaagttggccgcagtgttatcactcatggttatggcagcactgcataattctcttactgtcatgccatccgtaagatgcttttctgtgactggtgagtactcaaccaagtcattctgagaatagtgtatgcggcgaccgagttgctcttgcccggcgtcaatacgggataataccgcgccacatagcagaactttaaaagtgctcatcattggaaaacgttcttcggggcgaaaactctcaaggatcttaccgctgttgagatccagttcgatgtaacccactcgtgcacccaactgatcttcagcatcttttactttcaccagcgtttctgggtgagcaaaaacaggaaggcaaaatgccgcaaaaaagggaataagggcgacacggaaatgttgaatactcatattcttcctttttcaatattattgaagcatttatcagggttattgtctcatgagcggatacatatttgaatgtatttagaaaaataaacaaataggggtcagtgttacaaccaattaaccaattctgaacattatcgcgagcccatttatacctgaatatggctcataacaccccttgtttgcctggcggcagtagcgcggtggtcccacctgaccccatgccgaactcagaagtgaaacgccgtagcgccgatggtagtgtggggactccccatgcgagagtagggaactgccaggcatcaaataaaacgaaaggctcagtcgaaagactgggcctttcgcccgggctaattatggggtgtcgcccttattcgactctatagtgaagttcctattctctagtagtataggaacttctgaagtggggctcgagggccggcccagccgtcaaggttaaggctggccatatcagcgactgaaaagcggccagcctcggccttgtttgacgtataaccaaagccaccgggcaaccaatagcccttgtcacttttgatcaggtagaccgaccctgaagcgcttttttcgtattccataaaacccccttctgtgcgtgagtactcatagtataacaggcgtgagtaccaacgct

SEQ ID NO: 71 - DNA, 8036 bp, Artificial Sequence
  Synthetic vector
ctagattattaggcgaggccacgcgctttgagggtctgttcaaattcttcgaggcaacgttccgccacggcgagcatttcatccacttccgcacgggtcataacgagcggcggtgcagacacaatgtgatcgccgcacgcacgcataatgaggttgttgcgaaaaaaaatatcgcggcagagggtgccaatttcgccaaaatccggaaagagttcacgtttcgctttgtttttcacgagggtaaacgcctgcaccatgcccacgccacgcacatcatccacatgttcaaaacggctaaaggtttcacgccaacgtttctgcatatacgggccaatatcatctttcacacgctgcacaatgccttcatcacggagcgccgcaacattcgcatgcgccaccgccgcacacaccggatggccgctataggtaaagccatggttaaaatcaccgcccgcaatgagaccttccgcaacacgtttgcccacaaacaccgcgccaatcgggagatagccgctgctgaggcctttcgccgcggtaaagaggtccggctgaaagccaaaatgctgatggccaaaccattcgccggtacggccaaagccgcaaatcacttcatccgcaacgaggagcacatcatatttgcggcaaatacgttcaatttccggccaataggttgccggcggaacaatcacaccgcccgcaccctgaatcggttcgcccacaaacgccgccactttatccgcgccgatttcgagaattttttcttcgagccaacgcgccgcaaccacgccaaattcatccggggtcatatctttgccatgtttataccaccacggctgttcaatatgcgccatgcccggaatcgggagatcgccctgttcatgcatatatttcatgccgccgaggctcgcaccgccaatggtgctgccgtgatagccgttccaacggccaatgagggtttttttttccggtttgccctgcacatcccaataacgacgcaccatacgaatcatggtatccacgctttcgctgccgctgttggtataaaacacacgatcaaaacctgccggggtaacttcggcgaggaggctgctgagttccaccaccgccggatgggtggttttaaagaaggtgttataaaacgggagttcttccatctgacgacgcgccgcttccgcaaaatctttacggccatagcccacgttcacgcaccagaggcccgccatgccatcaataattttgttgccttcgctatcccagagatacacgccttcgccacgggtcatcacacgcgcacccgcctgattgaggctcgcggtatcggtaaacggatggagatgatgcgccgcatcgagttcacgccactgagaggtggtacgctgtttctgcatattatatctccttaaagctttaagcacccgccacagatgattcatcctgtaaagctttctcggcaggaacatactcatagcctagatctcttgctacagcttcataggtcacgtgtccgtttgcggtgtttaaacccgctctcagtgccgtattgtctgcgagcgcttttactgcccctttgttcgcgatttgcagcgcgtatggaacagtaacgttagtcagggcgattgttgatgtacgagggactgcgcctggcatgttcgctacagcataatgcacaaccccgtgtttttcatatgttggctgatcatgtgttgtgatatggtcgacagtttcgacgatgccgccttggtcgatcgctacatcaacaataactgaaccgggtttcatttgttttaccatttcctcagtgacaagagtcggagctttagcacccggaattaataccgcgcaaatgaggagatccgcttccgccacagcatcagcaatattgaccggattagaaattaacgttttaatctgatggccgaagatgtcatcaagctggcgcaagcggtctgcgtttaagtcaatgatcgtcacatctgcaccgaggccgacagccattttcgccgcgtttgtcccgacaacgcctcctccgataattgttacttttccgcgggaaacgccaggcaccccggcaagcagaatgccttttccgcctttaggcttttctaagaattgagcgccgatttgcgctgccattctgcccgcaacctctgacattggcgtcagaagaggcaatgtccggccttcactgaccgtttcatatgcgatggcagttactcctttatccttcaaggcctgtgcaagctcaggctcagctgctaaatgaaggtacgtaaacagcacaagtcctttgcgaaaataaacatattcttccggcagcggttcttttactttcatgaccatttcggcgtcccagacctgcttcggatcagcaatgatttccgctcctgctgactcataggcttcattttcaaatccgcttccaaggcccgcgcctgtttcaaccagcacccggtggccgtttgaaatgagctgagaaacgcccccgggtgttaatgcgacacggttttcattgttttttatctctttaggaacccctatgatcattatgccactctccttggttcctagatcctgtgtgaaattgttattgttatccgctcacaattccacacattatacgagccggaagcataaagtgtcaagcctggggtgcctaatgagtgagctaacttacattaattgcgttgcgctcactgcccgcatatctatgagccgggctgaatgatcgaccgagacaggccctgcggggctgcaggatccaattgtgagcggataacaattacgagcttcatgcacagtgatcgacgctgttgacaattaatcatcggctcgtataatgtgtggatgtggaattgtgagcgctcacaattccacaacggtttccctctagaaataattttgtttacaaggaggattataaaatgccagactggagcatgttgttggccgctattcgtacgatcttttccgcagccgaaaaacagtggaccctgctggatagcaagaaacgcggtgcggatgcagttgcggacgcgtctggcgtgggcaagatggtgaaaaacggtctggtctaccgtcagaatttcagcatccgtagctatgagattggtgtggacaagcgtgcgagcgttgaggctctgatgaatcattttcaagaaacgagcttgaatcactgcaaatgcatcggtctgatgcatggcggttttggttgcaccccggaaatgacgcgtcgtaatctgatctgggtcgttgccaagatgctggttcacgtggagcgttatccgtggtggggtgacgtagtgcagattaacacctggattagcagcagcggtaagaacggcatgggtcgcgactggcacgtgcacgactgtcagacgggcctgccgattatgcgtggcacctctgtgtgggtcatgatggataaacacactcgccgtctgagcaagctgccggaagaggttcgcgcagaaatcaccccgttcttcagcgaacgcgacgcggtcctggatgataacggccgtaaactgccgaaatttgacgatgatagcgcggcacacgtccgccgtggtttgacccctcgttggcatgatttcgacgtcaatcagcatgtcaacaacgtgaaatacgtcggttggattctggagagcgttccggtttggatgctggacggttacgaggttgccactatgtctctggaatatcgtcgcgagtgtcgtatggatagcgtggttcagtccctgaccgcggttagctcggatcacgcggacggcagcccgatcgtttgtcaacacctgctgcgcctggaagatggtacggagatcgtgcgtggtcaaaccgagtggcgtccgaagcaacaagcacgcgacctgggcaatatgggtttgcatccgaccgagtccaagtaagctttagtcaaaagcctccggtcggaggcttttgactttctgcttactgaatttgcggccgcctcgagaaaatgaagggaagttcctatacttactagagaataggaacttctatagggagtcgaataagggcgacacaaaaggtattctaaatgcataataaatactgataacatcttatagtttgtattatattttgtattatcgttgacatgtataattttgatatcaaaaactgattttccctttattattttcgagatttattttcttaattctctttaacaaactagaaatattgtatatacaaaaaatcataaataatagatgaatagtttaattataggtgttcatcaatcgaaaaagcaacgtatcttatttaaagtgcgttgcttttttctcatttataaggttaaataattctcatatatcaagcaaagtgacaggcgcccttaaatattctgacaaatgctctttccctaaactccccccataaaaaaacccgccgaagcgggtttttacgttatttgcggattaacgattactcgttatcagaaccgcccaggatgcctggcagttccctactctcgccgctgcgctcggtcgttcggctgcgggacctcagcgctagcggagtgtatactggcttactatgttggcactgatgagggtgtcagtgaagtgcttcatgtggcaggagaaaaaaggctgcaccggtgcgtcagcagaatatgtgatacaggatatattccgcttcctcgctcactgactcgctacgctcggtcgttcgactgcggcgagcggaaatggcttacgaacggggcggagatttcctggaagatgccaggaagatacttaacagggaagtgagagggccgcggcaaagccgtttttccataggctccgcccccctgacaagcatcacgaaatctgacgctcaaatcagtggtggcgaaacccgacaggactataaagataccaggcgtttccccctggcggctccctcgtgcgctctcctgttcctgcctttcggtttaccggtgtcattccgctgttatggccgcgtttgtctcattccacgcctgacactcagttccgggtaggcagttcgctccaagctggactgtatgcacgaaccccccgttcagtccgaccgctgcgccttatccggtaactatcgtcttgagtccaacccggaaagacatgcaaaagcaccactggcagcagccactggtaattgatttagaggagttagtcttgaagtcatgcgccggttaaggctaaactgaaaggacaagttttggtgactgcgctcctccaagccagttacctcggttcaaagagttggtagctcagagaaccttcgaaaaaccgccctgcaaggcggttttttcgttttcagagcaagagattacgcgcagaccaaaacgatctcaagaagatcatcttattaatcactgcccgctttccagtcgggaaacctgtcgtgccagctgcattaatgaatcggccaacgcgcggggagaggcggtttgcgtattgggcgccagggtggtttttcttttcaccagtgagactggcaacagctgattgcccttcaccgcctggccctgagagagttgcagcaagcggtccacgctggtttgccccagcaggcgaaaatcctgtttgatggtggttaacggcgggatataacatgagctatcttcggtatcgtcgtatcccactaccgagatatccgcaccaacgcgcagcccggactcggtaatggcgcgcattgcgcccagcgccatctgatcgttggcaaccagcatcgcagtgggaacgatgccctcattcagcatttgcatggtttgttgaaaaccggacatggcactccagtcgccttcccgttccgctatcggctgaatttgattgcgagtgagatatttatgccagccagccagacgcagacgcgccgagacagaacttaatgggcccgctaacagcgcgatttgctggtgacccaatgcgaccagatgctccacgcccagtcgcgtaccgtcctcatgggagaaaataatactgttgatgggtgtctggtcagagacatcaagaaataacgccggaacattagtgcaggcagcttccacagcaatggcatcctggtcatccagcggatagttaatgatcagcccactgacgcgttgcgcgagaagattgtgcaccgccgctttacaggcttcgacgccgcttcgttctaccatcgacaccaccacgctggcacccagttgatcggcgcgagatttaatcgccgcgacaatttgcgacggcgcgtgcagggccagactggaggtggcaacgccaatcagcaacgactgtttgcccgccagttgttgtgccacgcggttgggaatgtaattcagctccgccatcgccgcttccactttttcccgcgttttcgcagaaacgtggctggcctggttcaccacgcgggaaacggtctgataagagacaccggcatactctgcgacatcgtataacgttactggtttcatattcaccaccctgaattgactctcttccgggcgctatcatgccataccgcgaaaggttttgcgccattcgatggcgcgccgcttttaccaatgcttaatcagtgaggcacctatctcagcgatctgtctatttcgttcatccatagttgcctgactccccgtcgtgtagataactacgatacgggagggcttaccatctggccccagcgctgcgatgataccgcgagaaccacgctcaccggctccggatttatcagcaataaaccagccagccggaagggccgagcgcagaagtggtcctgcaactttatccgcctccatccagtctattaattgttgccgggaagctagagtaagtagttcgccagttaatagtttgcgcaacgttgttgccatcgctacaggcatcgtggtgtcacgctcgtcgtttggtatggcttcattcagctccggttcccaacgatcaaggcgagttacatgatcccccatgttgtgcaaaaaagcggttagctccttcggtcctccgatcgttgtcagaagtaagttggccgcagtgttatcactcatggttatggcagcactgcataattctcttactgtcatgccatccgtaagatgcttttctgtgactggtgagtactcaaccaagtcattctgagaatagtgtatgcggcgaccgagttgctcttgcccggcgtcaatacgggataataccgcgccacatagcagaactttaaaagtgctcatcattggaaaacgttcttcggggcgaaaactctcaaggatcttaccgctgttgagatccagttcgatgtaacccactcgtgcacccaactgatcttcagcatcttttactttcaccagcgtttctgggtgagcaaaaacaggaaggcaaaatgccgcaaaaaagggaataagggcgacacggaaatgttgaatactcatattcttcctttttcaatattattgaagcatttatcagggttattgtctcatgagcggatacatatttgaatgtatttagaaaaataaacaaataggggtcagtgttacaaccaattaaccaattctgaacattatcgcgagcccatttatacctgaatatggctcataacaccccttgtttgcctggcggcagtagcgcggtggtcccacctgaccccatgccgaactcagaagtgaaacgccgtagcgccgatggtagtgtggggactccccatgcgagagtagggaactgccaggcatcaaataaaacgaaaggctcagtcgaaagactgggcctttcgcccgggctaattatggggtgtcgcccttattcgactctatagtgaagttcctattctctagtagtataggaacttctgaagtggggctcgagggccggcccagccgtcaaggttaaggctggccatatcagcgactgaaaagcggccagcctcggccttgtttgacgtataaccaaagccaccgggcaaccaatagcccttgtcacttttgatcaggtagaccgaccctgaagcgcttttttcgtattccataaaacccccttctgtgcgtgagtactcatagtataacaggcgtgagtaccaacgct

SEQ ID NO: 72 - DNA, 7793 bp, Artificial Sequence
  Synthetic vector
ctagattattaggcgaggccacgcgctttgagggtctgttcaaattcttcgaggcaacgttccgccacggcgagcatttcatccacttccgcacgggtcataacgagcggcggtgcagacacaatgtgatcgccgcacgcacgcataatgaggttgttgcgaaaaaaaatatcgcggcagagggtgccaatttcgccaaaatccggaaagagttcacgtttcgctttgtttttcacgagggtaaacgcctgcaccatgcccacgccacgcacatcatccacatgttcaaaacggctaaaggtttcacgccaacgtttctgcatatacgggccaatatcatctttcacacgctgcacaatgccttcatcacggagcgccgcaacattcgcatgcgccaccgccgcacacaccggatggccgctataggtaaagccatggttaaaatcaccgcccgcaatgagaccttccgcaacacgtttgcccacaaacaccgcgccaatcgggagatagccgctgctgaggcctttcgccgcggtaaagaggtccggctgaaagccaaaatgctgatggccaaaccattcgccggtacggccaaagccgcaaatcacttcatccgcaacgaggagcacatcatatttgcggcaaatacgttcaatttccggccaataggttgccggcggaacaatcacaccgcccgcaccctgaatcggttcgcccacaaacgccgccactttatccgcgccgatttcgagaattttttcttcgagccaacgcgccgcaaccacgccaaattcatccggggtcatatctttgccatgtttataccaccacggctgttcaatatgcgccatgcccggaatcgggagatcgccctgttcatgcatatatttcatgccgccgaggctcgcaccgccaatggtgctgccgtgatagccgttccaacggccaatgagggtttttttttccggtttgccctgcacatcccaataacgacgcaccatacgaatcatggtatccacgctttcgctgccgctgttggtataaaacacacgatcaaaacctgccggggtaacttcggcgaggaggctgctgagttccaccaccgccggatgggtggttttaaagaaggtgttataaaacgggagttcttccatctgacgacgcgccgcttccgcaaaatctttacggccatagcccacgttcacgcaccagaggcccgccatgccatcaataattttgttgccttcgctatcccagagatacacgccttcgccacgggtcatcacacgcgcacccgcctgattgaggctcgcggtatcggtaaacggatggagatgatgcgccgcatcgagttcacgccactgagaggtggtacgctgtttctgcatattatatctccttaaagctttaagcacccgccacagatgattcatcctgtaaagctttctcggcaggaacatactcatagcctagatctcttgctacagcttcataggtcacgtgtccgtttgcggtgtttaaacccgctctcagtgccgtattgtctgcgagcgcttttactgcccctttgttcgcgatttgcagcgcgtatggaacagtaacgttagtcagggcgattgttgatgtacgagggactgcgcctggcatgttcgctacagcataatgcacaaccccgtgtttttcatatgttggctgatcatgtgttgtgatatggtcgacagtttcgacgatgccgccttggtcgatcgctacatcaacaataactgaaccgggtttcatttgttttaccatttcctcagtgacaagagtcggagctttagcacccggaattaataccgcgcaaatgaggagatccgcttccgccacagcatcagcaatattgaccggattagaaattaacgttttaatctgatggccgaagatgtcatcaagctggcgcaagcggtctgcgtttaagtcaatgatcgtcacatctgcaccgaggccgacagccattttcgccgcgtttgtcccgacaacgcctcctccgataattgttacttttccgcgggaaacgccaggcaccccggcaagcagaatgccttttccgcctttaggcttttctaagaattgagcgccgatttgcgctgccattctgcccgcaacctctgacattggcgtcagaagaggcaatgtccggccttcactgaccgtttcatatgcgatggcagttactcctttatccttcaaggcctgtgcaagctcaggctcagctgctaaatgaaggtacgtaaacagcacaagtcctttgcgaaaataaacatattcttccggcagcggttcttttactttcatgaccatttcggcgtcccagacctgcttcggatcagcaatgatttccgctcctgctgactcataggcttcattttcaaatccgcttccaaggcccgcgcctgtttcaaccagcacccggtggccgtttgaaatgagctgagaaacgcccccgggtgttaatgcgacacggttttcattgttttttatctctttaggaacccctatgatcattatgccactctccttggttcctagatcctgtgtgaaattgttattgttatccgctcacaattccacacattatacgagccggaagcataaagtgtcaagcctggggtgcctaatgagtgagctaacttacattaattgcgttgcgctcactgcccgcatatctatgagccgggctgaatgatcgaccgagacaggccctgcggggctgcaggatccaattgtgagcggataacaattacgagcttcatgcacagtgatcgacgctgttgacaattaatcatcggctcgtataatgtgtggatgtggaattgtgagcgctcacaattccacaacggtttccctctagaaataattttgtttacaaggaggattataaaatggggaaagcttatgaaaaagtttatgaagttacttatggagaaacagatggaagaaaagactgtagaataacttcaatgatgaacttcttttcagactgttgcttaagtcaagaagaaaagaattcaatgaactatgcagataatagcagtgaaactacttgggtattttttgattatgaaataatagttaatagatatccaagatatagagagaaaattaaggtaaaaacttatgttgaatctataagaaagttttattctaacagagtatttgaggcttatgatatggatggggccttagtagctagggctgatgtattagccttcttaataaacaaaaaaactagaagaccagctagaataagcgatgaagaatatgagattcatggattaagtaaggagtcttcaaaattattaagaaaaaaattaaactttgagaaatttgataaagaagatttagagatgaattttcacataagatatttagatatagatctaaatatgcatgtaagtaatattaagtatgtagagtggattttagaaacagtaccagttgatattgttctaaattacaaaatgaaaaaaataaaaataaaatttgaaaaagaaattacatatggtcataatgtaattataaagtcaaaaataattaagggtgaagatgaagtaaaggttcttcataaagtagaaaatgaagagggagaaagcattactttagcagaaacttattggtattaagctttagtcaaaagcctccggtcggaggcttttgactttctgcttactgaatttgcggccgcctcgagaaaatgaagggaagttcctatacttactagagaataggaacttctatagggagtcgaataagggcgacacaaaaggtattctaaatgcataataaatactgataacatcttatagtttgtattatattttgtattatcgttgacatgtataattttgatatcaaaaactgattttccctttattattttcgagatttattttcttaattctctttaacaaactagaaatattgtatatacaaaaaatcataaataatagatgaatagtttaattataggtgttcatcaatcgaaaaagcaacgtatcttatttaaagtgcgttgcttttttctcatttataaggttaaataattctcatatatcaagcaaagtgacaggcgcccttaaatattctgacaaatgctctttccctaaactccccccataaaaaaacccgccgaagcgggtttttacgttatttgcggattaacgattactcgttatcagaaccgcccaggatgcctggcagttccctactctcgccgctgcgctcggtcgttcggctgcgggacctcagcgctagcggagtgtatactggcttactatgttggcactgatgagggtgtcagtgaagtgcttcatgtggcaggagaaaaaaggctgcaccggtgcgtcagcagaatatgtgatacaggatatattccgcttcctcgctcactgactcgctacgctcggtcgttcgactgcggcgagcggaaatggcttacgaacggggcggagatttcctggaagatgccaggaagatacttaacagggaagtgagagggccgcggcaaagccgtttttccataggctccgcccccctgacaagcatcacgaaatctgacgctcaaatcagtggtggcgaaacccgacaggactataaagataccaggcgtttccccctggcggctccctcgtgcgctctcctgttcctgcctttcggtttaccggtgtcattccgctgttatggccgcgtttgtctcattccacgcctgacactcagttccgggtaggcagttcgctccaagctggactgtatgcacgaaccccccgttcagtccgaccgctgcgccttatccggtaactatcgtcttgagtccaacccggaaagacatgcaaaagcaccactggcagcagccactggtaattgatttagaggagttagtcttgaagtcatgcgccggttaaggctaaactgaaaggacaagttttggtgactgcgctcctccaagccagttacctcggttcaaagagttggtagctcagagaaccttcgaaaaaccgccctgcaaggcggttttttcgttttcagagcaagagattacgcgcagaccaaaacgatctcaagaagatcatcttattaatcactgcccgctttccagtcgggaaacctgtcgtgccagctgcattaatgaatcggccaacgcgcggggagaggcggtttgcgtattgggcgccagggtggtttttcttttcaccagtgagactggcaacagctgattgcccttcaccgcctggccctgagagagttgcagcaagcggtccacgctggtttgccccagcaggcgaaaatcctgtttgatggtggttaacggcgggatataacatgagctatcttcggtatcgtcgtatcccactaccgagatatccgcaccaacgcgcagcccggactcggtaatggcgcgcattgcgcccagcgccatctgatcgttggcaaccagcatcgcagtgggaacgatgccctcattcagcatttgcatggtttgttgaaaaccggacatggcactccagtcgccttcccgttccgctatcggctgaatttgattgcgagtgagatatttatgccagccagccagacgcagacgcgccgagacagaacttaatgggcccgctaacagcgcgatttgctggtgacccaatgcgaccagatgctccacgcccagtcgcgtaccgtcctcatgggagaaaataatactgttgatgggtgtctggtcagagacatcaagaaataacgccggaacattagtgcaggcagcttccacagcaatggcatcctggtcatccagcggatagttaatgatcagcccactgacgcgttgcgcgagaagattgtgcaccgccgctttacaggcttcgacgccgcttcgttctaccatcgacaccaccacgctggcacccagttgatcggcgcgagatttaatcgccgcgacaatttgcgacggcgcgtgcagggccagactggaggtggcaacgccaatcagcaacgactgtttgcccgccagttgttgtgccacgcggttgggaatgtaattcagctccgccatcgccgcttccactttttcccgcgttttcgcagaaacgtggctggcctggttcaccacgcgggaaacggtctgataagagacaccggcatactctgcgacatcgtataacgttactggtttcatattcaccaccctgaattgactctcttccgggcgctatcatgccataccgcgaaaggttttgcgccattcgatggcgcgccgcttttaccaatgcttaatcagtgaggcacctatctcagcgatctgtctatttcgttcatccatagttgcctgactccccgtcgtgtagataactacgatacgggagggcttaccatctggccccagcgctgcgatgataccgcgagaaccacgctcaccggctccggatttatcagcaataaaccagccagccggaagggccgagcgcagaagtggtcctgcaactttatccgcctccatccagtctattaattgttgccgggaagctagagtaagtagttcgccagttaatagtttgcgcaacgttgttgccatcgctacaggcatcgtggtgtcacgctcgtcgtttggtatggcttcattcagctccggttcccaacgatcaaggcgagttacatgatcccccatgttgtgcaaaaaagcggttagctccttcggtcctccgatcgttgtcagaagtaagttggccgcagtgttatcactcatggttatggcagcactgcataattctcttactgtcatgccatccgtaagatgcttttctgtgactggtgagtactcaaccaagtcattctgagaatagtgtatgcggcgaccgagttgctcttgcccggcgtcaatacgggataataccgcgccacatagcagaactttaaaagtgctcatcattggaaaacgttcttcggggcgaaaactctcaaggatcttaccgctgttgagatccagttcgatgtaacccactcgtgcacccaactgatcttcagcatcttttactttcaccagcgtttctgggtgagcaaaaacaggaaggcaaaatgccgcaaaaaagggaataagggcgacacggaaatgttgaatactcatattcttcctttttcaatattattgaagcatttatcagggttattgtctcatgagcggatacatatttgaatgtatttagaaaaataaacaaataggggtcagtgttacaaccaattaaccaattctgaacattatcgcgagcccatttatacctgaatatggctcataacaccccttgtttgcctggcggcagtagcgcggtggtcccacctgaccccatgccgaactcagaagtgaaacgccgtagcgccgatggtagtgtggggactccccatgcgagagtagggaactgccaggcatcaaataaaacgaaaggctcagtcgaaagactgggcctttcgcccgggctaattatggggtgtcgcccttattcgactctatagtgaagttcctattctctagtagtataggaacttctgaagtggggctcgagggccggcccagccgtcaaggttaaggctggccatatcagcgactgaaaagcggccagcctcggccttgtttgacgtataaccaaagccaccgggcaaccaatagcccttgtcacttttgatcaggtagaccgaccctgaagcgcttttttcgtattccataaaacccccttctgtgcgtgagtactcatagtataacaggcgtgagtaccaacgct

SEQ ID NO: 73 - DNA, 1365 bp, Pseudomonas syringae
  CDS (1)..(1365)
atgagcgcgaataaccctcaaaccctggaatggcaagcactgagcagcgagcaccacttggccccgttcagcgactataaacaactgaaagagaaaggtccgcgtatcatcacgcgcgcagagggtgtctacctgtgggactctgaaggcaataagattctggatggcatgtccggcctgtggtgcgtggcgatcggctacggtcgtgaagagctggcggacgcggcgagcaaacaaatgcgtgaactgccgtactataacttgtttttccagaccgcccatccgcctgttctggaactggccaaggcgattagcgacattgcgccggaaggtatgaatcacgttttcttcacgggtagcggtagcgaaggtaacgacacgatgttgcgtatggtccgtcactactgggcactgaaaggtcaaccgaacaaaaagaccattatcagccgtgttaacggctaccatggctctaccgtggcaggcgcaagcctgggcggcatgacctatatgcatgagcaaggtgacctgccgattccgggcgtggtccacatcccgcagccgtattggttcggcgagggtggcgacatgacgccggacgagtttggtatttgggcggctgagcagttggagaagaagatcctggagctgggtgtagagaatgtgggcgccttcatcgctgagccgattcagggcgctggtggtgttatcgttccgccggactcctactggccgaagattaaagaaattctgagccgctacgatattctgtttgcggcggacgaagtaatttgcggtttcggtcgcaccagcgagtggtttggtagcgacttctatggtctgcgtccggatatgatgactatcgcaaagggtctgacgtctggttacgtcccgatgggtggcctgatcgtgcgtgatgagatcgttgctgtgctgaatgagggtggtgactttaatcacggttttacctacagcggccatccggtcgccgcagcggttgcactggaaaacatccgcattctgcgtgaagagaagattgtcgagcgtgtccgttcggaaaccgcgccatatctgcagaaacgtctgcgcgagctgtccgatcacccgttggtcggcgaagtgcgcggtgtgggtctgctgggcgcgattgagctggttaaggataaaaccacgcgtgaacgttataccgacaagggtgccggcatgatctgtcgcacgttttgttttgataacggtctgatcatgcgcgctgtgggcgataccatgatcattgccccaccgttggttatcagcttcgcgcagattgatgaactggttgagaaagcgcgtacctgcctggatctgactttggcggtgctgcagggttaa

SEQ ID NO: 74 - protein, 454 aa, Pseudomonas syringae
MSANNPQTLEWQALSSEHHLAPFSDYKQLKEKGPRIITRAEGVYLWDSEGNKILDGMSGLWCVAIGYGREELADAASKQMRELPYYNLFFQTAHPPVLELAKAISDIAPEGMNHVFFTGSGSEGNDTMLRMVRHYWALKGQPNKKTIISRVNGYHGSTVAGASLGGMTYMHEQGDLPIPGVVHIPQPYWFGEGGDMTPDEFGIWAAEQLEKKILELGVENVGAFIAEPIQGAGGVIVPPDSYWPKIKEILSRYDILFAADEVICGFGRTSEWFGSDFYGLRPDMMTIAKGLTSGYVPMGGLIVRDEIVAVLNEGGDFNHGFTYSGHPVAAAVALENIRILREEKIVERVRSETAPYLQKRLRELSDHPLVGEVRGVGLLGAIELVKDKTTRERYTDKGAGMICRTFCFDNGLIMRAVGDTMIIAPPLVISFAQIDELVEKARTCLDLTLAVLQG

SEQ ID NO: 75 - DNA, 1365 bp, Pseudomonas protegens Pf-5
  CDS (1)..(1365)
atgacccacaaaaacccgcagacccgtgaatggcaaaccctgagcagcgaccaccacttggccccgtttagcgacttcaagcagctgaaagagaaaggtccgcgcattatcacccacgcgaaaggtgtgtatttgtgggatagcgagggtaatcaaattctggatggcatggcgggtctgtggtgcgtcgccatcggttacggccgtgatgagctggcagaggcggctagcaagcagatgcgtgagctgccatattacaatctgttctttcaaaccgcgcatccgccggtcctggaactgagcaaagcgattgcggatattgcgccagaaggcatgaaccacgttttcttcaccggcagcggctctgagggcaatgataccatgctgcgcatggtccgtcactattgggccatcaagggccaaccgaacaagaaaacgatcattagccgcgtgaacggttatcacggtagcactgttgcaggtgctagcctgggcggtatgacctacatgcacgagcagggtgacctgccgattccgggtattgtccatattccgcagccgtactggttcgcggaaggtggtgatatgagcccggaagaatttggcatttgggccgcaaaccagttggaagagaagatcctggagctgggcgtggacaatgtcggcgcgttcatcgcagagccgatccagggcgctggtggtgtaatcgtgccgcctgattcctattggcctcgtatcaaagaaattctggcgaagtacgacattctgttcgtcgcggacgaagtgatctgtggctttggtcgcacgggtgaatggtttggcagcgacttttacgacctgaagccggacatgatgaccatcgcaaagggtctgacgtcgggttacattcctatgggcggtctgatcgttcgtgatgaagtggtggccgtgctgaacgagggtggtgactttaatcacggtttcacttactctggtcatccggtcgccgcagcggtggccctggagaacattcgcatcatgcgcgaagagaaaatcattcaacgtgcacatgaaaaggcagcgccgtacctgcaaaaacgtttgcgtgagttgtccgatcatccgctggtcggcgaggttcgtggcgttggcctgctgggtgcgatcgagctggtgaaagataaagcgacgcgtgcacgttatgagggtcgtggtgttggtatgatttgtcgccagttctgctttgataatggcctgattatgcgtgcagttggtgacacgatgatcattgctccgccgctggttatctccgaggcggaaatcgacgagctggttgcgaaggctcgcaagtgcttggacctgaccttgagcgttctggaaggttaa

SEQ ID NO: 76 - protein, 454 aa, Pseudomonas protegens Pf-5
MTHKNPQTREWQTLSSDHHLAPFSDFKQLKEKGPRIITHAKGVYLWDSEGNQILDGMAGLWCVAIGYGRDELAEAASKQMRELPYYNLFFQTAHPPVLELSKAIADIAPEGMNHVFFTGSGSEGNDTMLRMVRHYWAIKGQPNKKTIISRVNGYHGSTVAGASLGGMTYMHEQGDLPIPGIVHIPQPYWFAEGGDMSPEEFGIWAANQLEEKILELGVDNVGAFIAEPIQGAGGVIVPPDSYWPRIKEILAKYDILFVADEVICGFGRTGEWFGSDFYDLKPDMMTIAKGLTSGYIPMGGLIVRDEVVAVLNEGGDFNHGFTYSGHPVAAAVALENIRIMREEKIIQRAHEKAAPYLQKRLRELSDHPLVGEVRGVGLLGAIELVKDKATRARYEGRGVGMICRQFCFDNGLIMRAVGDTMIIAPPLVISEAEIDELVAKARKCLDLTLSVLEG

SEQ ID NO: 77 - DNA, 1368 bp, Pseudomonas syringae
  CDS (1)..(1368)
atgtcggcccacaataacccgcaaaccctggaatggcaagcactgagcagcgagcatcacctggcgccgttcagcgactacaaacaactgaaagagaaaggtcctcgcatcattacccgtgcggaaggcgtctacctgtgggatagcgagggtaacaagatcctggatggtatgtccggtctgtggtgtgtcgcgatcggttatggccgtgaagagctggcggacgcggcgagcaagcagatgcgtgagctgccgtactacaatctgtttttccagactgcgcatccgccggttttggagctggcaaaggcgatttccgaaattgctccgcagggtatgaatcacgtgttctttaccggtagcggcagcgaaggtaatgacacgatgttgcgtatggtccgtcactattgggccctgaaaggtcagccggacaagaaaaccatcatctcccgtgttaatggctatcacggctctaccgtggctggtgcgagcctgggtggtatgacctacatgcacgagcagggcgatctgccgattccaggtgtggtgcatatcccgcaaccgtactggttcggtgaaggtggtgatatgactcctgatgagttcggcgtttgggccgcagagcagctggagaagaaaatcatcgagctgggtgtggaaaacgtcggtgcgtttattgcggaaccgatccagggtgcaggcggcgtcatcgtgccaccggatagctattggccgaagattaaagaaattctgagccgttatgatatcctgtttgctgccgacgaggtgatctgtggttttggccgtacgagcgagtggttcggcagcgacttctacggtctgaagccggatatgatgacgattgcgaaaggcctgacgagcggttacgtgccgatgggcggtctgattgttcgcgacgagattgttgcggtcctgaacgagggtggcgacttcaaccacggttttacctattctggccatccagtggcagcggccgttgcactggagaatatccgcattttgcgtgaagaacgtattgttgagcgcgtcaaaagcgaaaccgcaccgtatttgcaaaagcgtctgcgcgaactgtctaaccatccgctggtcggtgaagttcgcggtgtaggcctgctgggtgcgatcgagttggtcaaggataaagttacccgtgaacgctacacggacaagggcgcaggtatgatttgccgcacgttctgctttgacaacggcctgatcatgcgtgccgttggcgacaccatgattattgcaccgccgttggttattagctttgctgagatcgacgagttggtggaaaaagcccgtaagtgcctggatctgaccctggcggtgctgctgggttaa

SEQ ID NO: 78 - protein, 455 aa, Pseudomonas syringae
MSAHNNPQTLEWQALSSEHHLAPFSDYKQLKEKGPRIITRAEGVYLWDSEGNKILDGMSGLWCVAIGYGREELADAASKQMRELPYYNLFFQTAHPPVLELAKAISEIAPQGMNHVFFTGSGSEGNDTMLRMVRHYWALKGQPDKKTIISRVNGYHGSTVAGASLGGMTYMHEQGDLPIPGVVHIPQPYWFGEGGDMTPDEFGVWAAEQLEKKIIELGVENVGAFIAEPIQGAGGVIVPPDSYWPKIKEILSRYDILFAADEVICGFGRTSEWFGSDFYGLKPDMMTIAKGLTSGYVPMGGLIVRDEIVAVLNEGGDFNHGFTYSGHPVAAAVALENIRILREERIVERVKSETAPYLQKRLRELSNHPLVGEVRGVGLLGAIELVKDKVTRERYTDKGAGMICRTFCFDNGLIMRAVGDTMIIAPPLVISFAEIDELVEKARKCLDLTLAVLLG

SEQ ID NO: 79 - DNA, 1368 bp, Pseudomonas syringae
  CDS (1)..(1368)
atgtcggcgaacaataaccctcaaaccctggaatggcaagcactgagcagcgagcaccatctggcgccgttcagcgactataagcagctgaaagagaagggtccacgtattatcacccgcgctgaaggtgtttacctgtgggatagcgagggccataagatattggatggtatgagcggcctgtggtgtgttgcaatcggttatggtcgcgaagagctggcggacgcggccagcaagcagatgcgtgaactgccgtattacaatctgttcttccaaacggcgcatccgccggttctggagctggccaaagctatcagcgaaattgcaccgcaaggcatgaaccatgtgttcttcacgggttctggctccgagggcaacgataccatgctgcgtatggtccgtcactactgggcgctgaaaggtcaaccgaataagaaaactattatcagccgtgtcaacggttaccacggtagcacggtcgcaggcgccagcctgggtggtatgacctacatgcatgagcagggtgacttgccgattccgggtattgcgcacattccgcagccgtattggttcggcgagggcggtgatatgaccccggatgagtttggcgtgtgggcagcggaacagctggagaagaagatcctggaactgggtgtagaaaatgttgcggcctttatcgcggaaccggtccagggtgcgggtggtgtgattgtgccgcctgaaagctattggccgaagatcaaagaaattctgtcccgctacgacatcctgtttgcggcggatgaggtgatttgcggtttcggtcgtaccggcgagtggtttggtagcgacttctacggtctgaagccagatatgatgacgattgctaaaggcctgacctctggctatgttccgatgggcggtctgatcgttcgtgacgagatcgtggcagtgctgaacgagggtggtgactttaatcacggctttacgtatagcggccacccagtggctgcggcggttgccctggagaatattcgtatcttgcgtgaagagcgcatcgtggagcgtgtcaagtccgaaactgcaccgtacctgcagaaacgtctgcgtgaattgaatgatcacccgctggtcggtgaagttcgcggtgtcggcttgctgggcgccattgagctggtcaaagacaaagttacccgcgagcgttacaccgacaaaggtgctggcatgatttgccgcaccttttgtttcgagaacggcctgattatgcgtgcggttggtgacacgatgattatcgcaccgccgctggtcatcagctttgcccaaatcgacgagctggtggaaaaagcgcgcacgtgcctggatctgaccttggcagttttgcagagctaa

SEQ ID NO: 80 - protein, 455 aa, Pseudomonas syringae
MSANNNPQTLEWQALSSEHHLAPFSDYKQLKEKGPRIITRAEGVYLWDSEGHKILDGMSGLWCVAIGYGREELADAASKQMRELPYYNLFFQTAHPPVLELAKAISEIAPQGMNHVFFTGSGSEGNDTMLRMVRHYWALKGQPNKKTIISRVNGYHGSTVAGASLGGMTYMHEQGDLPIPGIAHIPQPYWFGEGGDMTPDEFGVWAAEQLEKKILELGVENVAAFIAEPVQGAGGVIVPPESYWPKIKEILSRYDILFAADEVICGFGRTGEWFGSDFYGLKPDMMTIAKGLTSGYVPMGGLIVRDEIVAVLNEGGDFNHGFTYSGHPVAAAVALENIRILREERIVERVKSETAPYLQKRLRELNDHPLVGEVRGVGLLGAIELVKDKVTRERYTDKGAGMICRTFCFENGLIMRAVGDTMIIAPPLVISFAQIDELVEKARTCLDLTLAVLQS

SEQ ID NO: 81 - DNA, 7943 bp, Artificial Sequence
  Synthetic vector
ctagattattaaccctgcagcaccgccaaagtcagatccaggcaggtacgcgctttctcaaccagttcatcaatctgcgcgaagctgataaccaacggtggggcaatgatcatggtatcgcccacagcgcgcatgatcagaccgttatcaaaacaaaacgtgcgacagatcatgccggcacccttgtcggtataacgttcacgcgtggttttatccttaaccagctcaatcgcgcccagcagacccacaccgcgcacttcgccgaccaacgggtgatcggacagctcgcgcagacgtttctgcagatatggcgcggtttccgaacggacacgctcgacaatcttctcttcacgcagaatgcggatgttttccagtgcaaccgctgcggcgaccggatggccgctgtaggtaaaaccgtgattaaagtcaccaccctcattcagcacagcaacgatctcatcacgcacgatcaggccacccatcgggacgtaaccagacgtcagaccctttgcgatagtcatcatatccggacgcagaccatagaagtcgctaccaaaccactcgctggtgcgaccgaaaccgcaaattacttcgtccgccgcaaacagaatatcgtagcggctcagaatttctttaatcttcggccagtaggagtccggcggaacgataacaccaccagcgccctgaatcggctcagcgatgaaggcgcccacattctctacacccagctccaggatcttcttctccaactgctcagccgcccaaataccaaactcgtccggcgtcatgtcgccaccctcgccgaaccaatacggctgcgggatgtggaccacgcccggaatcggcaggtcaccttgctcatgcatataggtcatgccgcccaggcttgcgcctgccacggtagagccatggtagccgttaacacggctgataatggtctttttgttcggttgacctttcagtgcccagtagtgacggaccatacgcaacatcgtgtcgttaccttcgctaccgctacccgtgaagaaaacgtgattcataccttccggcgcaatgtcgctaatcgccttggccagttccagaacaggcggatgggcggtctggaaaaacaagttatagtacggcagttcacgcatttgtttgctcgccgcgtccgccagctcttcacgaccgtagccgatcgccacgcaccacaggccggacatgccatccagaatcttattgccttcagagtcccacaggtagacaccctctgcgcgcgtgatgatacgcggacctttctctttcagttgtttatagtcgctgaacggggccaagtggtgctcgctgctcagtgcttgccattccagggtttgagggttattcgcgctcatattatatctccttaaagctttaagcacccgccacagatgattcatcctgtaaagctttctcggcaggaacatactcatagcctagatctcttgctacagcttcataggtcacgtgtccgtttgcggtgtttaaacccgctctcagtgccgtattgtctgcgagcgcttttactgcccctttgttcgcgatttgcagcgcgtatggaacagtaacgttagtcagggcgattgttgatgtacgagggactgcgcctggcatgttcgctacagcataatgcacaaccccgtgtttttcatatgttggctgatcatgtgttgtgatatggtcgacagtttcgacgatgccgccttggtcgatcgctacatcaacaataactgaaccgggtttcatttgttttaccatttcctcagtgacaagagtcggagctttagcacccggaattaataccgcgcaaatgaggagatccgcttccgccacagcatcagcaatattgaccggattagaaattaacgttttaatctgatggccgaagatgtcatcaagctggcgcaagcggtctgcgtttaagtcaatgatcgtcacatctgcaccgaggccgacagccattttcgccgcgtttgtcccgacaacgcctcctccgataattgttacttttccgcgggaaacgccaggcaccccggcaagcagaatgccttttccgcctttaggcttttctaagaattgagcgccgatttgcgctgccattctgcccgcaacctctgacattggcgtcagaagaggcaatgtccggccttcactgaccgtttcatatgcgatggcagttactcctttatccttcaaggcctgtgcaagctcaggctcagctgctaaatgaaggtacgtaaacagcacaagtcctttgcgaaaataaacatattcttccggcagcggttcttttactttcatgaccatttcggcgtcccagacctgcttcggatcagcaatgatttccgctcctgctgactcataggcttcattttcaaatccgcttccaaggcccgcgcctgtttcaaccagcacccggtggccgtttgaaatgagctgagaaacgcccccgggtgttaatgcgacacggttttcattgttttttatctctttaggaacccctatgatcattatgccactctccttggttcctagatcctgtgtgaaattgttattgttatccgctcacaattccacacattatacgagccggaagcataaagtgtcaagcctggggtgcctaatgagtgagctaacttacattaattgcgttgcgctcactgcccgcatatctatgagccgggctgaatgatcgaccgagacaggccctgcggggctgcaggatccaattgtgagcggataacaattacgagcttcatgcacagtgatcgacgctgttgacaattaatcatcggctcgtataatgtgtggatgtggaattgtgagcgctcacaattccacaacggtttccctctagaaataattttgtttacaaggaggattataaaatgactctagagtggaaaccgaaaccaaaactgcctcaactgctggatgatcacttcggtctgcacggtctggtgtttcgtcgtactttcgcaattcgttcttatgaagtgggtccagatcgttctacctccatcctggccgtcatgaaccacatgcaggaagccaccctgaatcacgcgaaatctgttggtatcctgggtgatggtttcggcactactctggaaatgtctaaacgtgacctgatgtgggtagtgcgtcgcacccacgtagcagtagagcgctaccctacttggggtgacactgtggaagtcgagtgttggattggcgcgtccggtaacaatggtatgcgtcgcgattttctggtccgtgactgtaaaacgggcgaaatcctgacgcgttgcacctccctgagcgttctgatgaacacccgcactcgtcgcctgtctaccatcccggacgaagtgcgcggtgagatcggtcctgctttcatcgataacgtggcagttaaagacgacgaaatcaagaaactgcaaaaactgaacgactccaccgcggactacatccagggcggtctgactccgcgctggaacgacctggatgttaatcagcatgtgaacaacctgaaatacgttgcttgggtcttcgagactgtgccggacagcattttcgaaagccatcacatttcctcttttactctggagtaccgtcgcgaatgtactcgcgactccgttctgcgcagcctgaccaccgtaagcggcggttctagcgaggcaggtctggtctgcgaccatctgctgcaactggaaggcggctccgaagtcctgcgtgcgcgtacggagtggcgtccaaagctgacggattctttccgcggcatctccgtaattccggcggaacctcgtgtttaagctttagtcaaaagcctccggtcggaggcttttgactttctgcttactgaatttgcggccgcctcgagaaaatgaagggaagttcctatacttactagagaataggaacttctatagggagtcgaataagggcgacacaaaaggtattctaaatgcataataaatactgataacatcttatagtttgtattatattttgtattatcgttgacatgtataattttgatatcaaaaactgattttccctttattattttcgagatttattttcttaattctctttaacaaactagaaatattgtatatacaaaaaatcataaataatagatgaatagtttaattataggtgttcatcaatcgaaaaagcaacgtatcttatttaaagtgcgttgcttttttctcatttataaggttaaataattctcatatatcaagcaaagtgacaggcgcccttaaatattctgacaaatgctctttccctaaactccccccataaaaaaacccgccgaagcgggtttttacgttatttgcggattaacgattactcgttatcagaaccgcccaggatgcctggcagttccctactctcgccgctgcgctcggtcgttcggctgcgggacctcagcgctagcggagtgtatactggcttactatgttggcactgatgagggtgtcagtgaagtgcttcatgtggcaggagaaaaaaggctgcaccggtgcgtcagcagaatatgtgatacaggatatattccgcttcctcgctcactgactcgctacgctcggtcgttcgactgcggcgagcggaaatggcttacgaacggggcggagatttcctggaagatgccaggaagatacttaacagggaagtgagagggccgcggcaaagccgtttttccataggctccgcccccctgacaagcatcacgaaatctgacgctcaaatcagtggtggcgaaacccgacaggactataaagataccaggcgtttccccctggcggctccctcgtgcgctctcctgttcctgcctttcggtttaccggtgtcattccgctgttatggccgcgtttgtctcattccacgcctgacactcagttccgggtaggcagttcgctccaagctggactgtatgcacgaaccccccgttcagtccgaccgctgcgccttatccggtaactatcgtcttgagtccaacccggaaagacatgcaaaagcaccactggcagcagccactggtaattgatttagaggagttagtcttgaagtcatgcgccggttaaggctaaactgaaaggacaagttttggtgactgcgctcctccaagccagttacctcggttcaaagagttggtagctcagagaaccttcgaaaaaccgccctgcaaggcggttttttcgttttcagagcaagagattacgcgcagaccaaaacgatctcaagaagatcatcttattaatcactgcccgctttccagtcgggaaacctgtcgtgccagctgcattaatgaatcggccaacgcgcggggagaggcggtttgcgtattgggcgccagggtggtttttcttttcaccagtgagactggcaacagctgattgcccttcaccgcctggccctgagagagttgcagcaagcggtccacgctggtttgccccagcaggcgaaaatcctgtttgatggtggttaacggcgggatataacatgagctatcttcggtatcgtcgtatcccactaccgagatatccgcaccaacgcgcagcccggactcggtaatggcgcgcattgcgcccagcgccatctgatcgttggcaaccagcatcgcagtgggaacgatgccctcattcagcatttgcatggtttgttgaaaaccggacatggcactccagtcgccttcccgttccgctatcggctgaatttgattgcgagtgagatatttatgccagccagccagacgcagacgcgccgagacagaacttaatgggcccgctaacagcgcgatttgctggtgacccaatgcgaccagatgctccacgcccagtcgcgtaccgtcctcatgggagaaaataatactgttgatgggtgtctggtcagagacatcaagaaataacgccggaacattagtgcaggcagcttccacagcaatggcatcctggtcatccagcggatagttaatgatcagcccactgacgcgttgcgcgagaagattgtgcaccgccgctttacaggcttcgacgccgcttcgttctaccatcgacaccaccacgctggcacccagttgatcggcgcgagatttaatcgccgcgacaatttgcgacggcgcgtgcagggccagactggaggtggcaacgccaatcagcaacgactgtttgcccgccagttgttgtgccacgcggttgggaatgtaattcagctccgccatcgccgcttccactttttcccgcgttttcgcagaaacgtggctggcctggttcaccacgcgggaaacggtctgataagagacaccggcatactctgcgacatcgtataacgttactggtttcatattcaccaccctgaattgactctcttccgggcgctatcatgccataccgcgaaaggttttgcgccattcgatggcgcgccgcttttaccaatgcttaatcagtgaggcacctatctcagcgatctgtctatttcgttcatccatagttgcctgactccccgtcgtgtagataactacgatacgggagggcttaccatctggccccagcgctgcgatgataccgcgagaaccacgctcaccggctccggatttatcagcaataaaccagccagccggaagggccgagcgcagaagtggtcctgcaactttatccgcctccatccagtctattaattgttgccgggaagctagagtaagtagttcgccagttaatagtttgcgcaacgttgttgccatcgctacaggcatcgtggtgtcacgctcgtcgtttggtatggcttcattcagctccggttcccaacgatcaaggcgagttacatgatcccccatgttgtgcaaaaaagcggttagctccttcggtcctccgatcgttgtcagaagtaagttggccgcagtgttatcactcatggttatggcagcactgcataattctcttactgtcatgccatccgtaagatgcttttctgtgactggtgagtactcaaccaagtcattctgagaatagtgtatgcggcgaccgagttgctcttgcccggcgtcaatacgggataataccgcgccacatagcagaactttaaaagtgctcatcattggaaaacgttcttcggggcgaaaactctcaaggatcttaccgctgttgagatccagttcgatgtaacccactcgtgcacccaactgatcttcagcatcttttactttcaccagcgtttctgggtgagcaaaaacaggaaggcaaaatgccgcaaaaaagggaataagggcgacacggaaatgttgaatactcatattcttcctttttcaatattattgaagcatttatcagggttattgtctcatgagcggatacatatttgaatgtatttagaaaaataaacaaataggggtcagtgttacaaccaattaaccaattctgaacattatcgcgagcccatttatacctgaatatggctcataacaccccttgtttgcctggcggcagtagcgcggtggtcccacctgaccccatgccgaactcagaagtgaaacgccgtagcgccgatggtagtgtggggactccccatgcgagagtagggaactgccaggcatcaaataaaacgaaaggctcagtcgaaagactgggcctttcgcccgggctaattatggggtgtcgcccttattcgactctatagtgaagttcctattctctagtagtataggaacttctgaagtggggctcgagggccggcccagccgtcaaggttaaggctggccatatcagcgactgaaaagcggccagcctcggccttgtttgacgtataaccaaagccaccgggcaaccaatagcccttgtcacttttgatcaggtagaccgaccctgaagcgcttttttcgtattccataaaacccccttctgtgcgtgagtactcatagtataacaggcgtgagtaccaacgct

SEQ ID NO: 82 - DNA, 7943 bp, Artificial Sequence
  Synthetic vector
ctagattattaaccttccagaacgctcaaggtcaggtccaagcacttgcgagccttcgcaaccagctcgtcgatttccgcctcggagataaccagcggcggagcaatgatcatcgtgtcaccaactgcacgcataatcaggccattatcaaagcagaactggcgacaaatcataccaacaccacgaccctcataacgtgcacgcgtcgctttatctttcaccagctcgatcgcacccagcaggccaacgccacgaacctcgccgaccagcggatgatcggacaactcacgcaaacgtttttgcaggtacggcgctgccttttcatgtgcacgttgaatgattttctcttcgcgcatgatgcgaatgttctccagggccaccgctgcggcgaccggatgaccagagtaagtgaaaccgtgattaaagtcaccaccctcgttcagcacggccaccacttcatcacgaacgatcagaccgcccataggaatgtaacccgacgtcagaccctttgcgatggtcatcatgtccggcttcaggtcgtaaaagtcgctgccaaaccattcacccgtgcgaccaaagccacagatcacttcgtccgcgacgaacagaatgtcgtacttcgccagaatttctttgatacgaggccaataggaatcaggcggcacgattacaccaccagcgccctggatcggctctgcgatgaacgcgccgacattgtccacgcccagctccaggatcttctcttccaactggtttgcggcccaaatgccaaattcttccgggctcatatcaccaccttccgcgaaccagtacggctgcggaatatggacaatacccggaatcggcaggtcaccctgctcgtgcatgtaggtcataccgcccaggctagcacctgcaacagtgctaccgtgataaccgttcacgcggctaatgatcgttttcttgttcggttggcccttgatggcccaatagtgacggaccatgcgcagcatggtatcattgccctcagagccgctgccggtgaagaaaacgtggttcatgccttctggcgcaatatccgcaatcgctttgctcagttccaggaccggcggatgcgcggtttgaaagaacagattgtaatatggcagctcacgcatctgcttgctagccgcctctgccagctcatcacggccgtaaccgatggcgacgcaccacagacccgccatgccatccagaatttgattaccctcgctatcccacaaatacacacctttcgcgtgggtgataatgcgcggacctttctctttcagctgcttgaagtcgctaaacggggccaagtggtggtcgctgctcagggtttgccattcacgggtctgcgggtttttgtgggtcatattatatctccttaaagctttaagcacccgccacagatgattcatcctgtaaagctttctcggcaggaacatactcatagcctagatctcttgctacagcttcataggtcacgtgtccgtttgcggtgtttaaacccgctctcagtgccgtattgtctgcgagcgcttttactgcccctttgttcgcgatttgcagcgcgtatggaacagtaacgttagtcagggcgattgttgatgtacgagggactgcgcctggcatgttcgctacagcataatgcacaaccccgtgtttttcatatgttggctgatcatgtgttgtgatatggtcgacagtttcgacgatgccgccttggtcgatcgctacatcaacaataactgaaccgggtttcatttgttttaccatttcctcagtgacaagagtcggagctttagcacccggaattaataccgcgcaaatgaggagatccgcttccgccacagcatcagcaatattgaccggattagaaattaacgttttaatctgatggccgaagatgtcatcaagctggcgcaagcggtctgcgtttaagtcaatgatcgtcacatctgcaccgaggccgacagccattttcgccgcgtttgtcccgacaacgcctcctccgataattgttacttttccgcgggaaacgccaggcaccccggcaagcagaatgccttttccgcctttaggcttttctaagaattgagcgccgatttgcgctgccattctgcccgcaacctctgacattggcgtcagaagaggcaatgtccggccttcactgaccgtttcatatgcgatggcagttactcctttatccttcaaggcctgtgcaagctcaggctcagctgctaaatgaaggtacgtaaacagcacaagtcctttgcgaaaataaacatattcttccggcagcggttcttttactttcatgaccatttcggcgtcccagacctgcttcggatcagcaatgatttccgctcctgctgactcataggcttcattttcaaatccgcttccaaggcccgcgcctgtttcaaccagcacccggtggccgtttgaaatgagctgagaaacgcccccgggtgttaatgcgacacggttttcattgttttttatctctttaggaacccctatgatcattatgccactctccttggttcctagatcctgtgtgaaattgttattgttatccgctcacaattccacacattatacgagccggaagcataaagtgtcaagcctggggtgcctaatgagtgagctaacttacattaattgcgttgcgctcactgcccgcatatctatgagccgggctgaatgatcgaccgagacaggccctgcggggctgcaggatccaattgtgagcggataacaattacgagcttcatgcacagtgatcgacgctgttgacaattaatcatcggctcgtataatgtgtggatgtggaattgtgagcgctcacaattccacaacggtttccctctagaaataattttgtttacaaggaggattataaaatgactctagagtggaaaccgaaaccaaaactgcctcaactgctggatgatcacttcggtctgcacggtctggtgtttcgtcgtactttcgcaattcgttcttatgaagtgggtccagatcgttctacctccatcctggccgtcatgaaccacatgcaggaagccaccctgaatcacgcgaaatctgttggtatcctgggtgatggtttcggcactactctggaaatgtctaaacgtgacctgatgtgggtagtgcgtcgcacccacgtagcagtagagcgctaccctacttggggtgacactgtggaagtcgagtgttggattggcgcgtccggtaacaatggtatgcgtcgcgattttctggtccgtgactgtaaaacgggcgaaatcctgacgcgttgcacctccctgagcgttctgatgaacacccgcactcgtcgcctgtctaccatcccggacgaagtgcgcggtgagatcggtcctgctttcatcgataacgtggcagttaaagacgacgaaatcaagaaactgcaaaaactgaacgactccaccgcggactacatccagggcggtctgactccgcgctggaacgacctggatgttaatcagcatgtgaacaacctgaaatacgttgcttgggtcttcgagactgtgccggacagcattttcgaaagccatcacatttcctcttttactctggagtaccgtcgcgaatgtactcgcgactccgttctgcgcagcctgaccaccgtaagcggcggttctagcgaggcaggtctggtctgcgaccatctgctgcaactggaaggcggctccgaagtcctgcgtgcgcgtacggagtggcgtccaaagctgacggattctttccgcggcatctccgtaattccggcggaacctcgtgtttaagctttagtcaaaagcctccggtcggaggcttttgactttctgcttactgaatttgcggccgcctcgagaaaatgaagggaagttcctatacttactagagaataggaacttctatagggagtcgaataagggcgacacaaaaggtattctaaatgcataataaatactgataacatcttatagtttgtattatattttgtattatcgttgacatgtataattttgatatcaaaaactgattttccctttattattttcgagatttattttcttaattctctttaacaaactagaaatattgtatatacaaaaaatcataaataatagatgaatagtttaattataggtgttcatcaatcgaaaaagcaacgtatcttatttaaagtgcgttgcttttttctcatttataaggttaaataattctcatatatcaagcaaagtgacaggcgcccttaaatattctgacaaatgctctttccctaaactccccccataaaaaaacccgccgaagcgggtttttacgttatttgcggattaacgattactcgttatcagaaccgcccaggatgcctggcagttccctactctcgccgctgcgctcggtcgttcggctgcgggacctcagcgctagcggagtgtatactggcttactatgttggcactgatgagggtgtcagtgaagtgcttcatgtggcaggagaaaaaaggctgcaccggtgcgtcagcagaatatgtgatacaggatatattccgcttcctcgctcactgactcgctacgctcggtcgttcgactgcggcgagcggaaatggcttacgaacggggcggagatttcctggaagatgccaggaagatacttaacagggaagtgagagggccgcggcaaagccgtttttccataggctccgcccccctgacaagcatcacgaaatctgacgctcaaatcagtggtggcgaaacccgacaggactataaagataccaggcgtttccccctggcggctccctcgtgcgctctcctgttcctgcctttcggtttaccggtgtcattccgctgttatggccgcgtttgtctcattccacgcctgacactcagttccgggtaggcagttcgctccaagctggactgtatgcacgaaccccccgttcagtccgaccgctgcgccttatccggtaactatcgtcttgagtccaacccggaaagacatgcaaaagcaccactggcagcagccactggtaattgatttagaggagttagtcttgaagtcatgcgccggttaaggctaaactgaaaggacaagttttggtgactgcgctcctccaagccagttacctcggttcaaagagttggtagctcagagaaccttcgaaaaaccgccctgcaaggcggttttttcgttttcagagcaagagattacgcgcagaccaaaacgatctcaagaagatcatcttattaatcactgcccgctttccagtcgggaaacctgtcgtgccagctgcattaatgaatcggccaacgcgcggggagaggcggtttgcgtattgggcgccagggtggtttttcttttcaccagtgagactggcaacagctgattgcccttcaccgcctggccctgagagagttgcagcaagcggtccacgctggtttgccccagcaggcgaaaatcctgtttgatggtggttaacggcgggatataacatgagctatcttcggtatcgtcgtatcccactaccgagatatccgcaccaacgcgcagcccggactcggtaatggcgcgcattgcgcccagcgccatctgatcgttggcaaccagcatcgcagtgggaacgatgccctcattcagcatttgcatggtttgttgaaaaccggacatggcactccagtcgccttcccgttccgctatcggctgaatttgattgcgagtgagatatttatgccagccagccagacgcagacgcgccgagacagaacttaatgggcccgctaacagcgcgatttgctggtgacccaatgcgaccagatgctccacgcccagtcgcgtaccgtcctcatgggagaaaataatactgttgatgggtgtctggtcagagacatcaagaaataacgccggaacattagtgcaggcagcttccacagcaatggcatcctggtcatccagcggatagttaatgatcagcccactgacgcgttgcgcgagaagattgtgcaccgccgctttacaggcttcgacgccgcttcgttctaccatcgacaccaccacgctggcacccagttgatcggcgcgagatttaatcgccgcgacaatttgcgacggcgcgtgcagggccagactggaggtggcaacgccaatcagcaacgactgtttgcccgccagttgttgtgccacgcggttgggaatgtaattcagctccgccatcgccgcttccactttttcccgcgttttcgcagaaacgtggctggcctggttcaccacgcgggaaacggtctgataagagacaccggcatactctgcgacatcgtataacgttactggtttcatattcaccaccctgaattgactctcttccgggcgctatcatgccataccgcgaaaggttttgcgccattcgatggcgcgccgcttttaccaatgcttaatcagtgaggcacctatctcagcgatctgtctatttcgttcatccatagttgcctgactccccgtcgtgtagataactacgatacgggagggcttaccatctggccccagcgctgcgatgataccgcgagaaccacgctcaccggctccggatttatcagcaataaaccagccagccggaagggccgagcgcagaagtggtcctgcaactttatccgcctccatccagtctattaattgttgccgggaagctagagtaagtagttcgccagttaatagtttgcgcaacgttgttgccatcgctacaggcatcgtggtgtcacgctcgtcgtttggtatggcttcattcagctccggttcccaacgatcaaggcgagttacatgatcccccatgttgtgcaaaaaagcggttagctccttcggtcctccgatcgttgtcagaagtaagttggccgcagtgttatcactcatggttatggcagcactgcataattctcttactgtcatgccatccgtaagatgcttttctgtgactggtgagtactcaaccaagtcattctgagaatagtgtatgcggcgaccgagttgctcttgcccggcgtcaatacgggataataccgcgccacatagcagaactttaaaagtgctcatcattggaaaacgttcttcggggcgaaaactctcaaggatcttaccgctgttgagatccagttcgatgtaacccactcgtgcacccaactgatcttcagcatcttttactttcaccagcgtttctgggtgagcaaaaacaggaaggcaaaatgccgcaaaaaagggaataagggcgacacggaaatgttgaatactcatattcttcctttttcaatattattgaagcatttatcagggttattgtctcatgagcggatacatatttgaatgtatttagaaaaataaacaaataggggtcagtgttacaaccaattaaccaattctgaacattatcgcgagcccatttatacctgaatatggctcataacaccccttgtttgcctggcggcagtagcgcggtggtcccacctgaccccatgccgaactcagaagtgaaacgccgtagcgccgatggtagtgtggggactccccatgcgagagtagggaactgccaggcatcaaataaaacgaaaggctcagtcgaaagactgggcctttcgcccgggctaattatggggtgtcgcccttattcgactctatagtgaagttcctattctctagtagtataggaacttctgaagtggggctcgagggccggcccagccgtcaaggttaaggctggccatatcagcgactgaaaagcggccagcctcggccttgtttgacgtataaccaaagccaccgggcaaccaatagcccttgtcacttttgatcaggtagaccgaccctgaagcgcttttttcgtattccataaaacccccttctgtgcgtgagtactcatagtataacaggcgtgagtaccaacgct

SEQ ID NO: 83 - DNA, 7946 bp, Artificial Sequence
  Synthetic vector
ctagattattaacccagcagcaccgccagggtcagatccaggcacttacgggctttttccaccaactcgtcgatctcagcaaagctaataaccaacggcggtgcaataatcatggtgtcgccaacggcacgcatgatcaggccgttgtcaaagcagaacgtgcggcaaatcatacctgcgcccttgtccgtgtagcgttcacgggtaactttatccttgaccaactcgatcgcacccagcaggcctacaccgcgaacttcaccgaccagcggatggttagacagttcgcgcagacgcttttgcaaatacggtgcggtttcgcttttgacgcgctcaacaatacgttcttcacgcaaaatgcggatattctccagtgcaacggccgctgccactggatggccagaataggtaaaaccgtggttgaagtcgccaccctcgttcaggaccgcaacaatctcgtcgcgaacaatcagaccgcccatcggcacgtaaccgctcgtcaggcctttcgcaatcgtcatcatatccggcttcagaccgtagaagtcgctgccgaaccactcgctcgtacggccaaaaccacagatcacctcgtcggcagcaaacaggatatcataacggctcagaatttctttaatcttcggccaatagctatccggtggcacgatgacgccgcctgcaccctggatcggttccgcaataaacgcaccgacgttttccacacccagctcgatgattttcttctccagctgctctgcggcccaaacgccgaactcatcaggagtcatatcaccaccttcaccgaaccagtacggttgcgggatatgcaccacacctggaatcggcagatcgccctgctcgtgcatgtaggtcataccacccaggctcgcaccagccacggtagagccgtgatagccattaacacgggagatgatggttttcttgtccggctgacctttcagggcccaatagtgacggaccatacgcaacatcgtgtcattaccttcgctgccgctaccggtaaagaacacgtgattcataccctgcggagcaatttcggaaatcgcctttgccagctccaaaaccggcggatgcgcagtctggaaaaacagattgtagtacggcagctcacgcatctgcttgctcgccgcgtccgccagctcttcacggccataaccgatcgcgacacaccacagaccggacataccatccaggatcttgttaccctcgctatcccacaggtagacgccttccgcacgggtaatgatgcgaggacctttctctttcagttgtttgtagtcgctgaacggcgccaggtgatgctcgctgctcagtgcttgccattccagggtttgcgggttattgtgggccgacatattatatctccttaaagctttaagcacccgccacagatgattcatcctgtaaagctttctcggcaggaacatactcatagcctagatctcttgctacagcttcataggtcacgtgtccgtttgcggtgtttaaacccgctctcagtgccgtattgtctgcgagcgcttttactgcccctttgttcgcgatttgcagcgcgtatggaacagtaacgttagtcagggcgattgttgatgtacgagggactgcgcctggcatgttcgctacagcataatgcacaaccccgtgtttttcatatgttggctgatcatgtgttgtgatatggtcgacagtttcgacgatgccgccttggtcgatcgctacatcaacaataactgaaccgggtttcatttgttttaccatttcctcagtgacaagagtcggagctttagcacccggaattaataccgcgcaaatgaggagatccgcttccgccacagcatcagcaatattgaccggattagaaattaacgttttaatctgatggccgaagatgtcatcaagctggcgcaagcggtctgcgtttaagtcaatgatcgtcacatctgcaccgaggccgacagccattttcgccgcgtttgtcccgacaacgcctcctccgataattgttacttttccgcgggaaacgccaggcaccccggcaagcagaatgccttttccgcctttaggcttttctaagaattgagcgccgatttgcgctgccattctgcccgcaacctctgacattggcgtcagaagaggcaatgtccggccttcactgaccgtttcatatgcgatggcagttactcctttatccttcaaggcctgtgcaagctcaggctcagctgctaaatgaaggtacgtaaacagcacaagtcctttgcgaaaataaacatattcttccggcagcggttcttttactttcatgaccatttcggcgtcccagacctgcttcggatcagcaatgatttccgctcctgctgactcataggcttcattttcaaatccgcttccaaggcccgcgcctgtttcaaccagcacccggtggccgtttgaaatgagctgagaaacgcccccgggtgttaatgcgacacggttttcattgttttttatctctttaggaacccctatgatcattatgccactctccttggttcctagatcctgtgtgaaattgttattgttatccgctcacaattccacacattatacgagccggaagcataaagtgtcaagcctggggtgcctaatgagtgagctaacttacattaattgcgttgcgctcactgcccgcatatctatgagccgggctgaatgatcgaccgagacaggccctgcggggctgcaggatccaattgtgagcggataacaattacgagcttcatgcacagtgatcgacgctgttgacaattaatcatcggctcgtataatgtgtggatgtggaattgtgagcgctcacaattccacaacggtttccctctagaaataattttgtttacaaggaggattataaaatgactctagagtggaaaccgaaaccaaaactgcctcaactgctggatgatcacttcggtctgcacggtctggtgtttcgtcgtactttcgcaattcgttcttatgaagtgggtccagatcgttctacctccatcctggccgtcatgaaccacatgcaggaagccaccctgaatcacgcgaaatctgttggtatcctgggtgatggtttcggcactactctggaaatgtctaaacgtgacctgatgtgggtagtgcgtcgcacccacgtagcagtagagcgctaccctacttggggtgacactgtggaagtcgagtgttggattggcgcgtccggtaacaatggtatgcgtcgcgattttctggtccgtgactgtaaaacgggcgaaatcctgacgcgttgcacctccctgagcgttctgatgaacacccgcactcgtcgcctgtctaccatcccggacgaagtgcgcggtgagatcggtcctgctttcatcgataacgtggcagttaaagacgacgaaatcaagaaactgcaaaaactgaacgactccaccgcggactacatccagggcggtctgactccgcgctggaacgacctggatgttaatcagcatgtgaacaacctgaaatacgttgcttgggtcttcgagactgtgccggacagcattttcgaaagccatcacatttcctcttttactctggagtaccgtcgcgaatgtactcgcgactccgttctgcgcagcctgaccaccgtaagcggcggttctagcgaggcaggtctggtctgcgaccatctgctgcaactggaaggcggctccgaagtcctgcgtgcgcgtacggagtggcgtccaaagctgacggattctttccgcggcatctccgtaattccggcggaacctcgtgtttaagctttagtcaaaagcctccggtcggaggcttttgactttctgcttactgaatttgcggccgcctcgagaaaatgaagggaagttcctatacttactagagaataggaacttctatagggagtcgaataagggcgacacaaaaggtattctaaatgcataataaatactgataacatcttatagtttgtattatattttgtattatcgttgacatgtataattttgatatcaaaaactgattttccctttattattttcgagatttattttcttaattctctttaacaaactagaaatattgtatatacaaaaaatcataaataatagatgaatagtttaattataggtgttcatcaatcgaaaaagcaacgtatcttatttaaagtgcgttgcttttttctcatttataaggttaaataattctcatatatcaagcaaagtgacaggcgcccttaaatattctgacaaatgctctttccctaaactccccccataaaaaaacccgccgaagcgggtttttacgttatttgcggattaacgattactcgttatcagaaccgcccaggatgcctggcagttccctactctcgccgctgcgctcggtcgttcggctgcgggacctcagcgctagcggagtgtatactggcttactatgttggcactgatgagggtgtcagtgaagtgcttcatgtggcaggagaaaaaaggctgcaccggtgcgtcagcagaatatgtgatacaggatatattccgcttcctcgctcactgactcgctacgctcggtcgttcgactgcggcgagcggaaatggcttacgaacggggcggagatttcctggaagatgccaggaagatacttaacagggaagtgagagggccgcggcaaagccgtttttccataggctccgcccccctgacaagcatcacgaaatctgacgctcaaatcagtggtggcgaaacccgacaggactataaagataccaggcgtttccccctggcggctccctcgtgcgctctcctgttcctgcctttcggtttaccggtgtcattccgctgttatggccgcgtttgtctcattccacgcctgacactcagttccgggtaggcagttcgctccaagctggactgtatgcacgaaccccccgttcagtccgaccgctgcgccttatccggtaactatcgtcttgagtccaacccggaaagacatgcaaaagcaccactggcagcagccactggtaattgatttagaggagttagtcttgaagtcatgcgccggttaaggctaaactgaaaggacaagttttggtgactgcgctcctccaagccagttacctcggttcaaagagttggtagctcagagaaccttcgaaaaaccgccctgcaaggcggttttttcgttttcagagcaagagattacgcgcagaccaaaacgatctcaagaagatcatcttattaatcactgcccgctttccagtcgggaaacctgtcgtgccagctgcattaatgaatcggccaacgcgcggggagaggcggtttgcgtattgggcgccagggtggtttttcttttcaccagtgagactggcaacagctgattgcccttcaccgcctggccctgagagagttgcagcaagcggtccacgctggtttgccccagcaggcgaaaatcctgtttgatggtggttaacggcgggatataacatgagctatcttcggtatcgtcgtatcccactaccgagatatccgcaccaacgcgcagcccggactcggtaatggcgcgcattgcgcccagcgccatctgatcgttggcaaccagcatcgcagtgggaacgatgccctcattcagcatttgcatggtttgttgaaaaccggacatggcactccagtcgccttcccgttccgctatcggctgaatttgattgcgagtgagatatttatgccagccagccagacgcagacgcgccgagacagaacttaatgggcccgctaacagcgcgatttgctggtgacccaatgcgaccagatgctccacgcccagtcgcgtaccgtcctcatgggagaaaataatactgttgatgggtgtctggtcagagacatcaagaaataacgccggaacattagtgcaggcagcttccacagcaatggcatcctggtcatccagcggatagttaatgatcagcccactgacgcgttgcgcgagaagattgtgcaccgccgctttacaggcttcgacgccgcttcgttctaccatcgacaccaccacgctggcacccagttgatcggcgcgagatttaatcgccgcgacaatttgcgacggcgcgtgcagggccagactggaggtggcaacgccaatcagcaacgactgtttgcccgccagttgttgtgccacgcggttgggaatgtaattcagctccgccatcgccgcttccactttttcccgcgttttcgcagaaacgtggctggcctggttcaccacgcgggaaacggtctgataagagacaccggcatactctgcgacatcgtataacgttactggtttcatattcaccaccctgaattgactctcttccgggcgctatcatgccataccgcgaaaggttttgcgccattcgatggcgcgccgcttttaccaatgcttaatcagtgaggcacctatctcagcgatctgtctatttcgttcatccatagttgcctgactccccgtcgtgtagataactacgatacgggagggcttaccatctggccccagcgctgcgatgataccgcgagaaccacgctcaccggctccggatttatcagcaataaaccagccagccggaagggccgagcgcagaagtggtcctgcaactttatccgcctccatccagtctattaattgttgccgggaagctagagtaagtagttcgccagttaatagtttgcgcaacgttgttgccatcgctacaggcatcgtggtgtcacgctcgtcgtttggtatggcttcattcagctccggttcccaacgatcaaggcgagttacatgatcccccatgttgtgcaaaaaagcggttagctccttcggtcctccgatcgttgtcagaagtaagttggccgcagtgttatcactcatggttatggcagcactgcataattctcttactgtcatgccatccgtaagatgcttttctgtgactggtgagtactcaaccaagtcattctgagaatagtgtatgcggcgaccgagttgctcttgcccggcgtcaatacgggataataccgcgccacatagcagaactttaaaagtgctcatcattggaaaacgttcttcggggcgaaaactctcaaggatcttaccgctgttgagatccagttcgatgtaacccactcgtgcacccaactgatcttcagcatcttttactttcaccagcgtttctgggtgagcaaaaacaggaaggcaaaatgccgcaaaaaagggaataagggcgacacggaaatgttgaatactcatattcttcctttttcaatattattgaagcatttatcagggttattgtctcatgagcggatacatatttgaatgtatttagaaaaataaacaaataggggtcagtgttacaaccaattaaccaattctgaacattatcgcgagcccatttatacctgaatatggctcataacaccccttgtttgcctggcggcagtagcgcggtggtcccacctgaccccatgccgaactcagaagtgaaacgccgtagcgccgatggtagtgtggggactccccatgcgagagtagggaactgccaggcatcaaataaaacgaaaggctcagtcgaaagactgggcctttcgcccgggctaattatggggtgtcgcccttattcgactctatagtgaagttcctattctctagtagtataggaacttctgaagtggggctcgagggccggcccagccgtcaaggttaaggctggccatatcagcgactgaaaagcggccagcctcggccttgtttgacgtataaccaaagccaccgggcaaccaatagcccttgtcacttttgatcaggtagaccgaccctgaagcgcttttttcgtattccataaaacccccttctgtgcgtgagtactcatagtataacaggcgtgagtaccaacgct

SEQ ID NO: 84 - DNA, 7946 bp, Artificial Sequence
  Synthetic vector
ctagattattagctctgcaaaactgccaaggtcagatccaggcacgtgcgcgctttttccaccagctcgtcgatttgggcaaagctgatgaccagcggcggtgcgataatcatcgtgtcaccaaccgcacgcataatcaggccgttctcgaaacaaaaggtgcggcaaatcatgccagcacctttgtcggtgtaacgctcgcgggtaactttgtctttgaccagctcaatggcgcccagcaagccgacaccgcgaacttcaccgaccagcgggtgatcattcaattcacgcagacgtttctgcaggtacggtgcagtttcggacttgacacgctccacgatgcgctcttcacgcaagatacgaatattctccagggcaaccgccgcagccactgggtggccgctatacgtaaagccgtgattaaagtcaccaccctcgttcagcactgccacgatctcgtcacgaacgatcagaccgcccatcggaacatagccagaggtcaggcctttagcaatcgtcatcatatctggcttcagaccgtagaagtcgctaccaaaccactcgccggtacgaccgaaaccgcaaatcacctcatccgccgcaaacaggatgtcgtagcgggacagaatttctttgatcttcggccaatagctttcaggcggcacaatcacaccacccgcaccctggaccggttccgcgataaaggccgcaacattttctacacccagttccaggatcttcttctccagctgttccgctgcccacacgccaaactcatccggggtcatatcaccgccctcgccgaaccaatacggctgcggaatgtgcgcaatacccggaatcggcaagtcaccctgctcatgcatgtaggtcataccacccaggctggcgcctgcgaccgtgctaccgtggtaaccgttgacacggctgataatagttttcttattcggttgacctttcagcgcccagtagtgacggaccatacgcagcatggtatcgttgccctcggagccagaacccgtgaagaacacatggttcatgccttgcggtgcaatttcgctgatagctttggccagctccagaaccggcggatgcgccgtttggaagaacagattgtaatacggcagttcacgcatctgcttgctggccgcgtccgccagctcttcgcgaccataaccgattgcaacacaccacaggccgctcataccatccaagatcttatggccctcgctatcccacaggtaaacaccttcagcgcgggtgataatacgtggacccttctctttcagctgcttatagtcgctgaacggcgccagatggtgctcgctgctcagtgcttgccattccagggtttgagggttattgttcgccgacatattatatctccttaaagctttaagcacccgccacagatgattcatcctgtaaagctttctcggcaggaacatactcatagcctagatctcttgctacagcttcataggtcacgtgtccgtttgcggtgtttaaacccgctctcagtgccgtattgtctgcgagcgcttttactgcccctttgttcgcgatttgcagcgcgtatggaacagtaacgttagtcagggcgattgttgatgtacgagggactgcgcctggcatgttcgctacagcataatgcacaaccccgtgtttttcatatgttggctgatcatgtgttgtgatatggtcgacagtttcgacgatgccgccttggtcgatcgctacatcaacaataactgaaccgggtttcatttgttttaccatttcctcagtgacaagagtcggagctttagcacccggaattaataccgcgcaaatgaggagatccgcttccgccacagcatcagcaatattgaccggattagaaattaacgttttaatctgatggccgaagatgtcatcaagctggcgcaagcggtctgcgtttaagtcaatgatcgtcacatctgcaccgaggccgacagccattttcgccgcgtttgtcccgacaacgcctcctccgataattgttacttttccgcgggaaacgccaggcaccccggcaagcagaatgccttttccgcctttaggcttttctaagaattgagcgccgatttgcgctgccattctgcccgcaacctctgacattggcgtcagaagaggcaatgtccggccttcactgaccgtttcatatgcgatggcagttactcctttatccttcaaggcctgtgcaagctcaggctcagctgctaaatgaaggtacgtaaacagcacaagtcctttgcgaaaataaacatattcttccggcagcggttcttttactttcatgaccatttcggcgtcccagacctgcttcggatcagcaatgatttccgctcctgctgactcataggcttcattttcaaatccgcttccaaggcccgcgcctgtttcaaccagcacccggtggccgtttgaaatgagctgagaaacgcccccgggtgttaatgcgacacggttttcattgttttttatctctttaggaacccctatgatcattatgccactctccttggttcctagatcctgtgtgaaattgttattgttatccgctcacaattccacacattatacgagccggaagcataaagtgtcaagcctggggtgcctaatgagtgagctaacttacattaattgcgttgcgctcactgcccgcatatctatgagccgggctgaatgatcgaccgagacaggccctgcggggctgcaggatccaattgtgagcggataacaattacgagcttcatgcacagtgatcgacgctgttgacaattaatcatcggctcgtataatgtgtggatgtggaattgtgagcgctcacaattccacaacggtttccctctagaaataattttgtttacaaggaggattataaaatgactctagagtggaaaccgaaaccaaaactgcctcaactgctggatgatcacttcggtctgcacggtctggtgtttcgtcgtactttcgcaattcgttcttatgaagtgggtccagatcgttctacctccatcctggccgtcatgaaccacatgcaggaagccaccctgaatcacgcgaaatctgttggtatcctgggtgatggtttcggcactactctggaaatgtctaaacgtgacctgatgtgggtagtgcgtcgcacccacgtagcagtagagcgctaccctacttggggtgacactgtggaagtcgagtgttggattggcgcgtccggtaacaatggtatgcgtcgcgattttctggtccgtgactgtaaaacgggcgaaatcctgacgcgttgcacctccctgagcgttctgatgaacacccgcactcgtcgcctgtctaccatcccggacgaagtgcgcggtgagatcggtcctgctttcatcgataacgtggcagttaaagacgacgaaatcaagaaactgcaaaaactgaacgactccaccgcggactacatccagggcggtctgactccgcgctggaacgacctggatgttaatcagcatgtgaacaacctgaaatacgttgcttgggtcttcgagactgtgccggacagcattttcgaaagccatcacatttcctcttttactctggagtaccgtcgcgaatgtactcgcgactccgttctgcgcagcctgaccaccgtaagcggcggttctagcgaggcaggtctggtctgcgaccatctgctgcaactggaaggcggctccgaagtcctgcgtgcgcgtacggagtggcgtccaaagctgacggattctttccgcggcatctccgtaattccggcggaacctcgtgtttaagctttagtcaaaagcctccggtcggaggcttttgactttctgcttactgaatttgcggccgcctcgagaaaatgaagggaagttcctatacttactagagaataggaacttctatagggagtcgaataagggcgacacaaaaggtattctaaatgcataataaatactgataacatcttatagtttgtattatattttgtattatcgttgacatgtataattttgatatcaaaaactgattttccctttattattttcgagatttattttcttaattctctttaacaaactagaaatattgtatatacaaaaaatcataaataatagatgaatagtttaattataggtgttcatcaatcgaaaaagcaacgtatcttatttaaagtgcgttgcttttttctcatttataaggttaaataattctcatatatcaagcaaagtgacaggcgcccttaaatattctgacaaatgctctttccctaaactccccccataaaaaaacccgccgaagcgggtttttacgttatttgcggattaacgattactcgttatcagaaccgcccaggatgcctggcagttccctactctcgccgctgcgctcggtcgttcggctgcgggacctcagcgctagcggagtgtatactggcttactatgttggcactgatgagggtgtcagtgaagtgcttcatgtggcaggagaaaaaaggctgcaccggtgcgtcagcagaatatgtgatacaggatatattccgcttcctcgctcactgactcgctacgctcggtcgttcgactgcggcgagcggaaatggcttacgaacggggcggagatttcctggaagatgccaggaagatacttaacagggaagtgagagggccgcggcaaagccgtttttccataggctccgcccccctgacaagcatcacgaaatctgacgctcaaatcagtggtggcgaaacccgacaggactataaagataccaggcgtttccccctggcggctccctcgtgcgctctcctgttcctgcctttcggtttaccggtgtcattccgctgttatggccgcgtttgtctcattccacgcctgacactcagttccgggtaggcagttcgctccaagctggactgtatgcacgaaccccccgttcagtccgaccgctgcgccttatccggtaactatcgtcttgagtccaacccggaaagacatgcaaaagcaccactggcagcagccactggtaattgatttagaggagttagtcttgaagtcatgcgccggttaaggctaaactgaaaggacaagttttggtgactgcgctcctccaagccagttacctcggttcaaagagttggtagctcagagaaccttcgaaaaaccgccctgcaaggcggttttttcgttttcagagcaagagattacgcgcagaccaaaacgatctcaagaagatcatcttattaatcactgcccgctttccagtcgggaaacctgtcgtgccagctgcattaatgaatcggccaacgcgcggggagaggcggtttgcgtattgggcgccagggtggtttttcttttcaccagtgagactggcaacagctgattgcccttcaccgcctggccctgagagagttgcagcaagcggtccacgctggtttgccccagcaggcgaaaatcctgtttgatggtggttaacggcgggatataacatgagctatcttcggtatcgtcgtatcccactaccgagatatccgcaccaacgcgcagcccggactcggtaatggcgcgcattgcgcccagcgccatctgatcgttggcaaccagcatcgcagtgggaacgatgccctcattcagcatttgcatggtttgttgaaaaccggacatggcactccagtcgccttcccgttccgctatcggctgaatttgattgcgagtgagatatttatgccagccagccagacgcagacgcgccgagacagaacttaatgggcccgctaacagcgcgatttgctggtgacccaatgcgaccagatgctccacgcccagtcgcgtaccgtcctcatgggagaaaataatactgttgatgggtgtctggtcagagacatcaagaaataacgccggaacattagtgcaggcagcttccacagcaatggcatcctggtcatccagcggatagttaatgatcagcccactgacgcgttgcgcgagaagattgtgcaccgccgctttacaggcttcgacgccgcttcgttctaccatcgacaccaccacgctggcacccagttgatcggcgcgagatttaatcgccgcgacaatttgcgacggcgcgtgcagggccagactggaggtggcaacgccaatcagcaacgactgtttgcccgccagttgttgtgccacgcggttgggaatgtaattcagctccgccatcgccgcttccactttttcccgcgttttcgcagaaacgtggctggcctggttcaccacgcgggaaacggtctgataagagacaccggcatactctgcgacatcgtataacgttactggtttcatattcaccaccctgaattgactctcttccgggcgctatcatgccataccgcgaaaggttttgcgccattcgatggcgcgccgcttttaccaatgcttaatcagtgaggcacctatctcagcgatctgtctatttcgttcatccatagttgcctgactccccgtcgtgtagataactacgatacgggagggcttaccatctggccccagcgctgcgatgataccgcgagaaccacgctcaccggctccggatttatcagcaataaaccagccagccggaagggccgagcgcagaagtggtcctgcaactttatccgcctccatccagtctattaattgttgccgggaagctagagtaagtagttcgccagttaatagtttgcgcaacgttgttgccatcgctacaggcatcgtggtgtcacgctcgtcgtttggtatggcttcattcagctccggttcccaacgatcaaggcgagttacatgatcccccatgttgtgcaaaaaagcggttagctccttcggtcctccgatcgttgtcagaagtaagttggccgcagtgttatcactcatggttatggcagcactgcataattctcttactgtcatgccatccgtaagatgcttttctgtgactggtgagtactcaaccaagtcattctgagaatagtgtatgcggcgaccgagttgctcttgcccggcgtcaatacgggataataccgcgccacatagcagaactttaaaagtgctcatcattggaaaacgttcttcggggcgaaaactctcaaggatcttaccgctgttgagatccagttcgatgtaacccactcgtgcacccaactgatcttcagcatcttttactttcaccagcgtttctgggtgagcaaaaacaggaaggcaaaatgccgcaaaaaagggaataagggcgacacggaaatgttgaatactcatattcttcctttttcaatattattgaagcatttatcagggttattgtctcatgagcggatacatatttgaatgtatttagaaaaataaacaaataggggtcagtgttacaaccaattaaccaattctgaacattatcgcgagcccatttatacctgaatatggctcataacaccccttgtttgcctggcggcagtagcgcggtggtcccacctgaccccatgccgaactcagaagtgaaacgccgtagcgccgatggtagtgtggggactccccatgcgagagtagggaactgccaggcatcaaataaaacgaaaggctcagtcgaaagactgggcctttcgcccgggctaattatggggtgtcgcccttattcgactctatagtgaagttcctattctctagtagtataggaacttctgaagtggggctcgagggccggcccagccgtcaaggttaaggctggccatatcagcgactgaaaagcggccagcctcggccttgtttgacgtataaccaaagccaccgggcaaccaatagcccttgtcacttttgatcaggtagaccgaccctgaagcgcttttttcgtattccataaaacccccttctgtgcgtgagtactcatagtataacaggcgtgagtaccaacgct

SEQ ID NO: 85 - DNA, 1092 bp, Nostoc sp. PCC 7120
  CDS (1)..(1092)
atggaaatcggcgttcctaaagaaactaaagatcaagaatttcgtgtggggttaagtcctgctagcgtgcgggtgttgaaggaaaatggtcatagtatatttgttcagactcaagctggtagtggtgctgggtttacagatgatgattatcgcagtgtaggggcggatattgtcccaacagcagaggcagtttggagtcgagagttagtagtcaaagttaaagaaccactgacgagtgagtacaactttttacagaaagggcagatattgtttacttatctgcatttagcagccgatcgcaaattaacagagcatttaattgattgtggcatttgtgcgatcgcttacgaaaccgtagaacaaccaggcgctaacagactaccactactgacccccatgagcattattgccggtcggttagcagtacaatttggcgcacgctatttagaacgccaacaaggtggtagaggtgtactgctgggtggtgttcctggagttaaaccaggaaaagtagttattctcggtggcggtgtagttggtacagaagctgccagaattgccgtaggtatgggtgcaaccgtacaaatattagatgtaaatgttgaacgtttatcttatttagaaactttgtttggttctagagtggaattactttacagcagttctgcccatatcgaagccgcagttaaagaagcagatttacttgttggtgctgttttggtactaggacgcagagcgccaattctagtatctcgtgaattagttaaacaaatgcacccaggttcggtaatagttgatgtggctgtagatcaaggtggttgtgtggaaaccttacacgccacatcccacaccaacccaacatacctagaagagggcgtagtacattacggcgttcccaatatgccaggtgcagtaccttggacagccactcaagctcttaacaacagtacattgccttacgttgtgcagttggcaaatcaaggactcaaagcgttggaagtgaatcaagtactcgccaagggtttgaatgtgcagaatcatcgccttgtacacccggctgtacaagaggtttttcctgatttagtccattga

SEQ ID NO: 86 - protein, 363 aa, Nostoc sp. PCC 7120
MEIGVPKETKDQEFRVGLSPASVRVLKENGHSIFVQTQAGSGAGFTDDDYRSVGADIVPTAEAVWSRELVVKVKEPLTSEYNFLQKGQILFTYLHLAADRKLTEHLIDCGICAIAYETVEQPGANRLPLLTPMSIIAGRLAVQFGARYLERQQGGRGVLLGGVPGVKPGKVVILGGGVVGTEAARIAVGMGATVQILDVNVERLSYLETLFGSRVELLYSSSAHIEAAVKEADLLVGAVLVLGRRAPILVSRELVKQMHPGSVIVDVAVDQGGCVETLHATSHTNPTYLEEGVVHYGVPNMPGAVPWTATQALNNSTLPYVVQLANQGLKALEVNQVLAKGLNVQNHRLVHPAVQEVFPDLVH

SEQ ID NO: 87 - DNA, 1119 bp, Rhizobium leguminosarum
  CDS (1)..(1119)
atgcgtgtcggttgcccgaaggaaatcaagaatcatgaatatcgcgtcggtctgacgccggcttcggtgcgagaatatgttgcccacggccacgatgtctgggtggagaccaaggcaggcgtcggtatcggcgctgatgatgccgcctatgccgcggctggcgccaagatcgccgcctccgccaaggatatcttcgaaaagtgcgatatgatcgtcaaggtgaaggagccgcagcccgccgaatgggcgcagctccgtgacggccagcttctctacacctatctgcatctggcgccggatcctgaacagaccaagggtctcatcgcctccggcgttaccgcgatcgcctatgagacggtgaccgacgagcgcggcggtctgccgttgctggcgccgatgtcggaggtcgccggacgcctgtcgatccaggcaggggcgaccgcgctccagaaggccaatggtggcctcggcgtcctgctcggcggcgtacctggtgtgctgccggccaaggtcgcggtcatcggcggcggcgttgtcggcctgcatgccgccaggatggccgccggcctcggcgccgatgtcagcatcctcgacaagtcgctgccgcgcttgcgccagcttgacgatatcttcgccggccgcatccacacccgttattccagcatccaggcgctggaggaggaagtcttctcggccgatctcattatcggcgccgtgctgattcccggcgctgccgctccgaagctcgtcacccgcgagatgctctccggcatgaagaagggctccgtcatcgtcgacgtcgccatcgaccagggcggctgcttcgagacctcgcatgcgacgacccattccgatccgacctatgaagtcgacggcgtcgtgcattattgcgtcgccaacatgccgggcgccgtgccggtcacctcggcgcacgcgctgaacaatgccacattggttcatggcctggcgcttgccgatcgcggcctgcgcgctattgccgaagacaagcacctgaggaacggcctcaacgtgcacaagggccgcattaccagcaagcccgtcgccgacgcgctgggctacgaagcctttgcgccggagagcgtactgaacgtagcgtaa

SEQ ID NO: 88 - protein, 372 aa, Rhizobium leguminosarum
MRVGCPKEIKNHEYRVGLTPASVREYVAHGHDVWVETKAGVGIGADDAAYAAAGAKIAASAKDIFEKCDMIVKVKEPQPAEWAQLRDGQLLYTYLHLAPDPEQTKGLIASGVTAIAYETVTDERGGLPLLAPMSEVAGRLSIQAGATALQKANGGLGVLLGGVPGVLPAKVAVIGGGVVGLHAARMAAGLGADVSILDKSLPRLRQLDDIFAGRIHTRYSSIQALEEEVFSADLIIGAVLIPGAAAPKLVTREMLSGMKKGSVIVDVAIDQGGCFETSHATTHSDPTYEVDGVVHYCVANMPGAVPVTSAHALNNATLVHGLALADRGLRAIAEDKHLRNGLNVHKGRITSKPVADALGYEAFAPESVLNVA

SEQ ID NO: 89 - DNA, 1113 bp, Bradyrhizobium japonicum
  CDS (1)..(1113)
atgaaggtcggagttccaaaggaaatcaaggcgcacgaatatcgcgtgggccttaccccaggagctgcccgtgaatacgtggcagcgggccaccgcgtgatgatcgagaccaatgccggcgctggcattggtgcaaccgatggcgattatcgcaatgccggcgcaacgatcttaacttcggcagctgaggtattcgcatcgagcgagatgatcgtaaaggtcaaggagcctcagccggccgaatggtcccagctgcgtgaggatcaaatcctgttcacctatttgcacttggccccggacccggaacaggctgccggcctcttgaaatctggatgcattgcaatcgcctatgagaccgtaactgatgctcatggtggtcttccactgctggcgccgatgagcgaggtcgcgggcaggctttcgatcgaagcggcgggtagcgctctaaagcggagtacaggggggcgagggctgctgatcggtggggtgcccggggttcagcctgcccgaatcgtggtgattggaggtggggtcgtcggtacgcacgccgcgcgcatggcggctggtctgggcgcagaggtgaccatcatcgatcgttcgatcatccggctccgtgagctggacgagctattcgaaggacgggttcgcactaggttttcgaccatcgaatccgtggaggaagaggtatttgcggcggacgtggtgattggtgcggtgctcgtcccaggggcaagcgctccgaagctggtccgccggagcatgctgagctcaatgcgcaagagagccgtactcgtggacgtcgctatcgatcagggcggctgctttgagacatcgcgcccaaccactcacgctgatccaacatacgaagtagatggcatcattcattattgtgtggccaatatgccgggtgccgtgccgctaacctcgagccaggcactgaataacgcgaccctgccgtttggtttggctctggccaacaagggtttttccgccgtactcgagaatccacatctgcgcgcaggcctcaacgtccatcggggccggctaacatacaaggcggtggccgagagcctcgggctgcccttctccccgatcgaacaggctgcggcctga

SEQ ID NO: 90 - protein, 370 aa, Bradyrhizobium japonicum
MKVGVPKEIKAHEYRVGLTPGAAREYVAAGHRVMIETNAGAGIGATDGDYRNAGATILTSAAEVFASSEMIVKVKEPQPAEWSQLREDQILFTYLHLAPDPEQAAGLLKSGCIAIAYETVTDAHGGLPLLAPMSEVAGRLSIEAAGSALKRSTGGRGLLIGGVPGVQPARIVVIGGGVVGTHAARMAAGLGAEVTIIDRSIIRLRELDELFEGRVRTRFSTIESVEEEVFAADVVIGAVLVPGASAPKLVRRSMLSSMRKRAVLVDVAIDQGGCFETSRPTTHADPTYEVDGIIHYCVANMPGAVPLTSSQALNNATLPFGLALANKGFSAVLENPHLRAGLNVHRGRLTYKAVAESLGLPFSPIEQAAA

SEQ ID NO: 91 - DNA, 1134 bp, Bacillus megaterium
  CDS (1)..(1134)
atgattattggcgtaccaaaagaaatcaaaaacaacgaaaaccgagtagcgattacaccagcaggcgtagcatcatttgttggtacaggtcatcgtgtattaattgaaaatgaagcgggtattggaagtaacttcacaaacgaagattatgtaaaggctggagctgaaattgttgagacagcagctgacgtttgggcacaagctgaaatggttatgaaagtaaaagaaccactagcaagtgaatacggctattttagaccaggtcttatcttattcacataccttcacttagcagctgaaccagcactagcaaaagcattaaaagatagcggcgtaacagccattgcttatgaaacagtagcagtaaatcgtacattgcctctattaacgcctatgagcgaagtagcaggacgtatggctgctcaaatcggtgcacaattccttcaaaaatcaaacggtggaaaaggaattttactagcgggtgttcctggagttagccgcggaaaagtaacgattatcggaggcggcggtgttggtacaaatgctgcaaaaatcgcaatcggtctcggtgctgatgtaacaattattgatttaagtcctgaacgcttacgtcaattagacgatatctttggcaaccaaatcaatacgctagtgtcaaacccttataatattgcggatgcagtagcggagtcagatttagtgattggcgcagtattaatcccaggtgcaaaagctccaaaactagtaacagaagaaatggtgaaaacaatgaagccaggttctgttattgttgacgtagcaatcgaccaaggtggtatcgttgaaacaatcgaccacattacaacacacgatcatccaacttatgaaaagcacggcgttgtacactatgcagttgcaaatatgccgggagcagttcctcgcacatcaacaattgctttaacaaacgtaaccgtaccttacgcacttcaaattgcttctaaaggtgttcacaaagcaatcgctcaaaacgaagcgttaaaattaggagtgaacgttgccaacggagccattacgtacgaagcagttgcacatgatttaggttatgattatgtatcagtagacgtagctcttgaaaaagaattagcttctatctaa

SEQ ID NO: 92 - protein, 377 aa, Bacillus megaterium
MIIGVPKEIKNNENRVAITPAGVASFVGTGHRVLIENEAGIGSNFTNEDYVKAGAEIVETAADVWAQAEMVMKVKEPLASEYGYFRPGLILFTYLHLAAEPALAKALKDSGVTAIAYETVAVNRTLPLLTPMSEVAGRMAAQIGAQFLQKSNGGKGILLAGVPGVSRGKVTIIGGGGVGTNAAKIAIGLGADVTIIDLSPERLRQLDDIFGNQINTLVSNPYNIADAVAESDLVIGAVLIPGAKAPKLVTEEMVKTMKPGSVIVDVAIDQGGIVETIDHITTHDHPTYEKHGVVHYAVANMPGAVPRTSTIALTNVTVPYALQIASKGVHKAIAQNEALKLGVNVANGAITYEAVAHDLGYDYVSVDVALEKELASI

SEQ ID NO: 93 - DNA, 7913 bp, Artificial Sequence
  Synthetic vector
ctagattattaggcgaggccacgcgctttgagggtctgttcaaattcttcgaggcaacgttccgccacggcgagcatttcatccacttccgcacgggtcataacgagcggcggtgcagacacaatgtgatcgccgcacgcacgcataatgaggttgttgcgaaaaaaaatatcgcggcagagggtgccaatttcgccaaaatccggaaagagttcacgtttcgctttgtttttcacgagggtaaacgcctgcaccatgcccacgccacgcacatcatccacatgttcaaaacggctaaaggtttcacgccaacgtttctgcatatacgggccaatatcatctttcacacgctgcacaatgccttcatcacggagcgccgcaacattcgcatgcgccaccgccgcacacaccggatggccgctataggtaaagccatggttaaaatcaccgcccgcaatgagaccttccgcaacacgtttgcccacaaacaccgcgccaatcgggagatagccgctgctgaggcctttcgccgcggtaaagaggtccggctgaaagccaaaatgctgatggccaaaccattcgccggtacggccaaagccgcaaatcacttcatccgcaacgaggagcacatcatatttgcggcaaatacgttcaatttccggccaataggttgccggcggaacaatcacaccgcccgcaccctgaatcggttcgcccacaaacgccgccactttatccgcgccgatttcgagaattttttcttcgagccaacgcgccgcaaccacgccaaattcatccggggtcatatctttgccatgtttataccaccacggctgttcaatatgcgccatgcccggaatcgggagatcgccctgttcatgcatatatttcatgccgccgaggctcgcaccgccaatggtgctgccgtgatagccgttccaacggccaatgagggtttttttttccggtttgccctgcacatcccaataacgacgcaccatacgaatcatggtatccacgctttcgctgccgctgttggtataaaacacacgatcaaaacctgccggggtaacttcggcgaggaggctgctgagttccaccaccgccggatgggtggttttaaagaaggtgttataaaacgggagttcttccatctgacgacgcgccgcttccgcaaaatctttacggccatagcccacgttcacgcaccagaggcccgccatgccatcaataattttgttgccttcgctatcccagagatacacgccttcgccacgggtcatcacacgcgcacccgcctgattgaggctcgcggtatcggtaaacggatggagatgatgcgccgcatcgagttcacgccactgagaggtggtacgctgtttctgcatattatatctccttaaagcttcaatggactaaatcaggaaaaacctcttgtacagccgggtgtacaaggcgatgattctgcacattcaaacccttggcgagtacttgattcacttccaacgctttgagtccttgatttgccaactgcacaacgtaaggcaatgtactgttgttaagagcttgagtggctgtccaaggtactgcacctggcatattgggaacgccgtaatgtactacgccctcttcaaggtatgttgggttggtgtgggatgtggcgtgtaaggtttccacacaaccaccttgatctacagccacatcaactattaccgaacctgggtgcatttgtttaactaattcacgagatactagaattggcgctctgcgtcctagtaccaaaacagcaccaacaagtaaatctgcttctttaactgcggcttcgatatgggcagaactgctgtaaagtaattccactctagaaccaaacaaagtttctaaataagataaacgttcaacatttacatctaatatttgtacggttgcacccatacctacggcaattctggcagcttctgtaccaactacaccgccaccgagaataactacttttcctggtttaactccaggaacaccacccagcagtacacctctaccaccttgttggcgttctaaatagcgtgcgccaaattgtactgctaaccgaccggcaataatgctcatgggggtcagtagtggtagtctgttagcgcctggttgttctacggtttcgtaagcgatcgcacaaatgccacaatcaattaaatgctctgttaatttgcgatcggctgctaaatgcagataagtaaacaatatctgccctttctgtaaaaagttgtactcactcgtcagtggttctttaactttgactactaactctcgactccaaactgcctctgctgttgggacaatatccgcccctacactgcgataatcatcatctgtaaacccagcaccactaccagcttgagtctgaacaaatatactatgaccattttccttcaacacccgcacgctagcaggacttaaccccacacgaaattcttgatctttagtttctttaggaacgccgatttccattatgccactctccttggttcctagatcctgtgtgaaattgttattgttatccgctcacaattccacacattatacgagccggaagcataaagtgtcaagcctggggtgcctaatgagtgagctaacttacattaattgcgttgcgctcactgcccgcatatctatgagccgggctgaatgatcgaccgagacaggccctgcggggctgcaggatccaattgtgagcggataacaattacgagcttcatgcacagtgatcgacgctgttgacaattaatcatcggctcgtataatgtgtggatgtggaattgtgagcgctcacaattccacaacggtttccctctagaaataattttgtttacaaggaggattataaaatgactctagagtggaaaccgaaaccaaaactgcctcaactgctggatgatcacttcggtctgcacggtctggtgtttcgtcgtactttcgcaattcgttcttatgaagtgggtccagatcgttctacctccatcctggccgtcatgaaccacatgcaggaagccaccctgaatcacgcgaaatctgttggtatcctgggtgatggtttcggcactactctggaaatgtctaaacgtgacctgatgtgggtagtgcgtcgcacccacgtagcagtagagcgctaccctacttggggtgacactgtggaagtcgagtgttggattggcgcgtccggtaacaatggtatgcgtcgcgattttctggtccgtgactgtaaaacgggcgaaatcctgacgcgttgcacctccctgagcgttctgatgaacacccgcactcgtcgcctgtctaccatcccggacgaagtgcgcggtgagatcggtcctgctttcatcgataacgtggcagttaaagacgacgaaatcaagaaactgcaaaaactgaacgactccaccgcggactacatccagggcggtctgactccgcgctggaacgacctggatgttaatcagcatgtgaacaacctgaaatacgttgcttgggtcttcgagactgtgccggacagcattttcgaaagccatcacatttcctcttttactctggagtaccgtcgcgaatgtactcgcgactccgttctgcgcagcctgaccaccgtaagcggcggttctagcgaggcaggtctggtctgcgaccatctgctgcaactggaaggcggctccgaagtcctgcgtgcgcgtacggagtggcgtccaaagctgacggattctttccgcggcatctccgtaattccggcggaacctcgtgtttaagctttagtcaaaagcctccggtcggaggcttttgactttctgcttactgaatttgcggccgcctcgagaaaatgaagggaagttcctatacttactagagaataggaacttctatagggagtcgaataagggcgacacaaaaggtattctaaatgcataataaatactgataacatcttatagtttgtattatattttgtattatcgttgacatgtataattttgatatcaaaaactgattttccctttattattttcgagatttattttcttaattctctttaacaaactagaaatattgtatatacaaaaaatcataaataatagatgaatagtttaattataggtgttcatcaatcgaaaaagcaacgtatcttatttaaagtgcgttgcttttttctcatttataaggttaaataattctcatatatcaagcaaagtgacaggcgcccttaaatattctgacaaatgctctttccctaaactccccccataaaaaaacccgccgaagcgggtttttacgttatttgcggattaacgattactcgttatcagaaccgcccaggatgcctggcagttccctactctcgccgctgcgctcggtcgttcggctgcgggacctcagcgctagcggagtgtatactggcttactatgttggcactgatgagggtgtcagtgaagtgcttcatgtggcaggagaaaaaaggctgcaccggtgcgtcagcagaatatgtgatacaggatatattccgcttcctcgctcactgactcgctacgctcggtcgttcgactgcggcgagcggaaatggcttacgaacggggcggagatttcctggaagatgccaggaagatacttaacagggaagtgagagggccgcggcaaagccgtttttccataggctccgcccccctgacaagcatcacgaaatctgacgctcaaatcagtggtggcgaaacccgacaggactataaagataccaggcgtttccccctggcggctccctcgtgcgctctcctgttcctgcctttcggtttaccggtgtcattccgctgttatggccgcgtttgtctcattccacgcctgacactcagttccgggtaggcagttcgctccaagctggactgtatgcacgaaccccccgttcagtccgaccgctgcgccttatccggtaactatcgtcttgagtccaacccggaaagacatgcaaaagcaccactggcagcagccactggtaattgatttagaggagttagtcttgaagtcatgcgccggttaaggctaaactgaaaggacaagttttggtgactgcgctcctccaagccagttacctcggttcaaagagttggtagctcagagaaccttcgaaaaaccgccctgcaaggcggttttttcgttttcagagcaagagattacgcgcagaccaaaacgatctcaagaagatcatcttattaatcactgcccgctttccagtcgggaaacctgtcgtgccagctgcattaatgaatcggccaacgcgcggggagaggcggtttgcgtattgggcgccagggtggtttttcttttcaccagtgagactggcaacagctgattgcccttcaccgcctggccctgagagagttgcagcaagcggtccacgctggtttgccccagcaggcgaaaatcctgtttgatggtggttaacggcgggatataacatgagctatcttcggtatcgtcgtatcccactaccgagatatccgcaccaacgcgcagcccggactcggtaatggcgcgcattgcgcccagcgccatctgatcgttggcaaccagcatcgcagtgggaacgatgccctcattcagcatttgcatggtttgttgaaaaccggacatggcactccagtcgccttcccgttccgctatcggctgaatttgattgcgagtgagatatttatgccagccagccagacgcagacgcgccgagacagaacttaatgggcccgctaacagcgcgatttgctggtgacccaatgcgaccagatgctccacgcccagtcgcgtaccgtcctcatgggagaaaataatactgttgatgggtgtctggtcagagacatcaagaaataacgccggaacattagtgcaggcagcttccacagcaatggcatcctggtcatccagcggatagttaatgatcagcccactgacgcgttgcgcgagaagattgtgcaccgccgctttacaggcttcgacgccgcttcgttctaccatcgacaccaccacgctggcacccagttgatcggcgcgagatttaatcgccgcgacaatttgcgacggcgcgtgcagggccagactggaggtggcaacgccaatcagcaacgactgtttgcccgccagttgttgtgccacgcggttgggaatgtaattcagctccgccatcgccgcttccactttttcccgcgttttcgcagaaacgtggctggcctggttcaccacgcgggaaacggtctgataagagacaccggcatactctgcgacatcgtataacgttactggtttcatattcaccaccctgaattgactctcttccgggcgctatcatgccataccgcgaaaggttttgcgccattcgatggcgcgccgcttttaccaatgcttaatcagtgaggcacctatctcagcgatctgtctatttcgttcatccatagttgcctgactccccgtcgtgtagataactacgatacgggagggcttaccatctggccccagcgctgcgatgataccgcgagaaccacgctcaccggctccggatttatcagcaataaaccagccagccggaagggccgagcgcagaagtggtcctgcaactttatccgcctccatccagtctattaattgttgccgggaagctagagtaagtagttcgccagttaatagtttgcgcaacgttgttgccatcgctacaggcatcgtggtgtcacgctcgtcgtttggtatggcttcattcagctccggttcccaacgatcaaggcgagttacatgatcccccatgttgtgcaaaaaagcggttagctccttcggtcctccgatcgttgtcagaagtaagttggccgcagtgttatcactcatggttatggcagcactgcataattctcttactgtcatgccatccgtaagatgcttttctgtgactggtgagtactcaaccaagtcattctgagaatagtgtatgcggcgaccgagttgctcttgcccggcgtcaatacgggataataccgcgccacatagcagaactttaaaagtgctcatcattggaaaacgttcttcggggcgaaaactctcaaggatcttaccgctgttgagatccagttcgatgtaacccactcgtgcacccaactgatcttcagcatcttttactttcaccagcgtttctgggtgagcaaaaacaggaaggcaaaatgccgcaaaaaagggaataagggcgacacggaaatgttgaatactcatattcttcctttttcaatattattgaagcatttatcagggttattgtctcatgagcggatacatatttgaatgtatttagaaaaataaacaaataggggtcagtgttacaaccaattaaccaattctgaacattatcgcgagcccatttatacctgaatatggctcataacaccccttgtttgcctggcggcagtagcgcggtggtcccacctgaccccatgccgaactcagaagtgaaacgccgtagcgccgatggtagtgtggggactccccatgcgagagtagggaactgccaggcatcaaataaaacgaaaggctcagtcgaaagactgggcctttcgcccgggctaattatggggtgtcgcccttattcgactctatagtgaagttcctattctctagtagtataggaacttctgaagtggggctcgagggccggcccagccgtcaaggttaaggctggccatatcagcgactgaaaagcggccagcctcggccttgtttgacgtataaccaaagccaccgggcaaccaatagcccttgtcacttttgatcaggtagaccgaccctgaagcgcttttttcgtattccataaaacccccttctgtgcgtgagtactcatagtataacaggcgtgagtaccaacgct

SEQ ID NO: 94 - DNA, 7940 bp, Artificial Sequence
  Synthetic vector
ctagattattaggcgaggccacgcgctttgagggtctgttcaaattcttcgaggcaacgttccgccacggcgagcatttcatccacttccgcacgggtcataacgagcggcggtgcagacacaatgtgatcgccgcacgcacgcataatgaggttgttgcgaaaaaaaatatcgcggcagagggtgccaatttcgccaaaatccggaaagagttcacgtttcgctttgtttttcacgagggtaaacgcctgcaccatgcccacgccacgcacatcatccacatgttcaaaacggctaaaggtttcacgccaacgtttctgcatatacgggccaatatcatctttcacacgctgcacaatgccttcatcacggagcgccgcaacattcgcatgcgccaccgccgcacacaccggatggccgctataggtaaagccatggttaaaatcaccgcccgcaatgagaccttccgcaacacgtttgcccacaaacaccgcgccaatcgggagatagccgctgctgaggcctttcgccgcggtaaagaggtccggctgaaagccaaaatgctgatggccaaaccattcgccggtacggccaaagccgcaaatcacttcatccgcaacgaggagcacatcatatttgcggcaaatacgttcaatttccggccaataggttgccggcggaacaatcacaccgcccgcaccctgaatcggttcgcccacaaacgccgccactttatccgcgccgatttcgagaattttttcttcgagccaacgcgccgcaaccacgccaaattcatccggggtcatatctttgccatgtttataccaccacggctgttcaatatgcgccatgcccggaatcgggagatcgccctgttcatgcatatatttcatgccgccgaggctcgcaccgccaatggtgctgccgtgatagccgttccaacggccaatgagggtttttttttccggtttgccctgcacatcccaataacgacgcaccatacgaatcatggtatccacgctttcgctgccgctgttggtataaaacacacgatcaaaacctgccggggtaacttcggcgaggaggctgctgagttccaccaccgccggatgggtggttttaaagaaggtgttataaaacgggagttcttccatctgacgacgcgccgcttccgcaaaatctttacggccatagcccacgttcacgcaccagaggcccgccatgccatcaataattttgttgccttcgctatcccagagatacacgccttcgccacgggtcatcacacgcgcacccgcctgattgaggctcgcggtatcggtaaacggatggagatgatgcgccgcatcgagttcacgccactgagaggtggtacgctgtttctgcatattatatctccttaaagctttacgctacgttcagtacgctctccggcgcaaaggcttcgtagcccagcgcgtcggcgacgggcttgctggtaatgcggcccttgtgcacgttgaggccgttcctcaggtgcttgtcttcggcaatagcgcgcaggccgcgatcggcaagcgccaggccatgaaccaatgtggcattgttcagcgcgtgcgccgaggtgaccggcacggcgcccggcatgttggcgacgcaataatgcacgacgccgtcgacttcataggtcggatcggaatgggtcgtcgcatgcgaggtctcgaagcagccgccctggtcgatggcgacgtcgacgatgacggagcccttcttcatgccggagagcatctcgcgggtgacgagcttcggagcggcagcgccgggaatcagcacggcgccgataatgagatcggccgagaagacttcctcctccagcgcctggatgctggaataacgggtgtggatgcggccggcgaagatatcgtcaagctggcgcaagcgcggcagcgacttgtcgaggatgctgacatcggcgccgaggccggcggccatcctggcggcatgcaggccgacaacgccgccgccgatgaccgcgaccttggccggcagcacaccaggtacgccgccgagcaggacgccgaggccaccattggccttctgcagcgcggtcgcccctgcctggatcgacaggcgtccggcgacctccgacatcggcgccagcaacggcagaccgccgcgctcgtcggtcaccgtctcataggcgatcgcggtaacgccggaggcgatgagacccttggtctgttcaggatccggcgccagatgcagataggtgtagagaagctggccgtcacggagctgcgcccattcggcgggctgcggctccttcaccttgacgatcatatcgcacttttcgaagatatccttggcggaggcggcgatcttggcgccagccgcggcataggcggcatcatcagcgccgataccgacgcctgccttggtctccacccagacatcgtggccgtgggcaacatattctcgcaccgaagccggcgtcagaccgacgcgatattcatgattcttgatttccttcgggcaaccgacacgcattatgccactctccttggttcctagatcctgtgtgaaattgttattgttatccgctcacaattccacacattatacgagccggaagcataaagtgtcaagcctggggtgcctaatgagtgagctaacttacattaattgcgttgcgctcactgcccgcatatctatgagccgggctgaatgatcgaccgagacaggccctgcggggctgcaggatccaattgtgagcggataacaattacgagcttcatgcacagtgatcgacgctgttgacaattaatcatcggctcgtataatgtgtggatgtggaattgtgagcgctcacaattccacaacggtttccctctagaaataattttgtttacaaggaggattataaaatgactctagagtggaaaccgaaaccaaaactgcctcaactgctggatgatcacttcggtctgcacggtctggtgtttcgtcgtactttcgcaattcgttcttatgaagtgggtccagatcgttctacctccatcctggccgtcatgaaccacatgcaggaagccaccctgaatcacgcgaaatctgttggtatcctgggtgatggtttcggcactactctggaaatgtctaaacgtgacctgatgtgggtagtgcgtcgcacccacgtagcagtagagcgctaccctacttggggtgacactgtggaagtcgagtgttggattggcgcgtccggtaacaatggtatgcgtcgcgattttctggtccgtgactgtaaaacgggcgaaatcctgacgcgttgcacctccctgagcgttctgatgaacacccgcactcgtcgcctgtctaccatcccggacgaagtgcgcggtgagatcggtcctgctttcatcgataacgtggcagttaaagacgacgaaatcaagaaactgcaaaaactgaacgactccaccgcggactacatccagggcggtctgactccgcgctggaacgacctggatgttaatcagcatgtgaacaacctgaaatacgttgcttgggtcttcgagactgtgccggacagcattttcgaaagccatcacatttcctcttttactctggagtaccgtcgcgaatgtactcgcgactccgttctgcgcagcctgaccaccgtaagcggcggttctagcgaggcaggtctggtctgcgaccatctgctgcaactggaaggcggctccgaagtcctgcgtgcgcgtacggagtggcgtccaaagctgacggattctttccgcggcatctccgtaattccggcggaacctcgtgtttaagctttagtcaaaagcctccggtcggaggcttttgactttctgcttactgaatttgcggccgcctcgagaaaatgaagggaagttcctatacttactagagaataggaacttctatagggagtcgaataagggcgacacaaaaggtattctaaatgcataataaatactgataacatcttatagtttgtattatattttgtattatcgttgacatgtataattttgatatcaaaaactgattttccctttattattttcgagatttattttcttaattctctttaacaaactagaaatattgtatatacaaaaaatcataaataatagatgaatagtttaattataggtgttcatcaatcgaaaaagcaacgtatcttatttaaagtgcgttgcttttttctcatttataaggttaaataattctcatatatcaagcaaagtgacaggcgcccttaaatattctgacaaatgctctttccctaaactccccccataaaaaaacccgccgaagcgggtttttacgttatttgcggattaacgattactcgttatcagaaccgcccaggatgcctggcagttccctactctcgccgctgcgctcggtcgttcggctgcgggacctcagcgctagcggagtgtatactggcttactatgttggcactgatgagggtgtcagtgaagtgcttcatgtggcaggagaaaaaaggctgcaccggtgcgtcagcagaatatgtgatacaggatatattccgcttcctcgctcactgactcgctacgctcggtcgttcgactgcggcgagcggaaatggcttacgaacggggcggagatttcctggaagatgccaggaagatacttaacagggaagtgagagggccgcggcaaagccgtttttccataggctccgcccccctgacaagcatcacgaaatctgacgctcaaatcagtggtggcgaaacccgacaggactataaagataccaggcgtttccccctggcggctccctcgtgcgctctcctgttcctgcctttcggtttaccggtgtcattccgctgttatggccgcgtttgtctcattccacgcctgacactcagttccgggtaggcagttcgctccaagctggactgtatgcacgaaccccccgttcagtccgaccgctgcgccttatccggtaactatcgtcttgagtccaacccggaaagacatgcaaaagcaccactggcagcagccactggtaattgatttagaggagttagtcttgaagtcatgcgccggttaaggctaaactgaaaggacaagttttggtgactgcgctcctccaagccagttacctcggttcaaagagttggtagctcagagaaccttcgaaaaaccgccctgcaaggcggttttttcgttttcagagcaagagattacgcgcagaccaaaacgatctcaagaagatcatcttattaatcactgcccgctttccagtcgggaaacctgtcgtgccagctgcattaatgaatcggccaacgcgcggggagaggcggtttgcgtattgggcgccagggtggtttttcttttcaccagtgagactggcaacagctgattgcccttcaccgcctggccctgagagagttgcagcaagcggtccacgctggtttgccccagcaggcgaaaatcctgtttgatggtggttaacggcgggatataacatgagctatcttcggtatcgtcgtatcccactaccgagatatccgcaccaacgcgcagcccggactcggtaatggcgcgcattgcgcccagcgccatctgatcgttggcaaccagcatcgcagtgggaacgatgccctcattcagcatttgcatggtttgttgaaaaccggacatggcactccagtcgccttcccgttccgctatcggctgaatttgattgcgagtgagatatttatgccagccagccagacgcagacgcgccgagacagaacttaatgggcccgctaacagcgcgatttgctggtgacccaatgcgaccagatgctccacgcccagtcgcgtaccgtcctcatgggagaaaataatactgttgatgggtgtctggtcagagacatcaagaaataacgccggaacattagtgcaggcagcttccacagcaatggcatcctggtcatccagcggatagttaatgatcagcccactgacgcgttgcgcgagaagattgtgcaccgccgctttacaggcttcgacgccgcttcgttctaccatcgacaccaccacgctggcacccagttgatcggcgcgagatttaatcgccgcgacaatttgcgacggcgcgtgcagggccagactggaggtggcaacgccaatcagcaacgactgtttgcccgccagttgttgtgccacgcggttgggaatgtaattcagctccgccatcgccgcttccactttttcccgcgttttcgcagaaacgtggctggcctggttcaccacgcgggaaacggtctgataagagacaccggcatactctgcgacatcgtataacgttactggtttcatattcaccaccctgaattgactctcttccgggcgctatcatgccataccgcgaaaggttttgcgccattcgatggcgcgccgcttttaccaatgcttaatcagtgaggcacctatctcagcgatctgtctatttcgttcatccatagttgcctgactccccgtcgtgtagataactacgatacgggagggcttaccatctggccccagcgctgcgatgataccgcgagaaccacgctcaccggctccggatttatcagcaataaaccagccagccggaagggccgagcgcagaagtggtcctgcaactttatccgcctccatccagtctattaattgttgccgggaagctagagtaagtagttcgccagttaatagtttgcgcaacgttgttgccatcgctacaggcatcgtggtgtcacgctcgtcgtttggtatggcttcattcagctccggttcccaacgatcaaggcgagttacatgatcccccatgttgtgcaaaaaagcggttagctccttcggtcctccgatcgttgtcagaagtaagttggccgcagtgttatcactcatggttatggcagcactgcataattctcttactgtcatgccatccgtaagatgcttttctgtgactggtgagtactcaaccaagtcattctgagaatagtgtatgcggcgaccgagttgctcttgcccggcgtcaatacgggataataccgcgccacatagcagaactttaaaagtgctcatcattggaaaacgttcttcggggcgaaaactctcaaggatcttaccgctgttgagatccagttcgatgtaacccactcgtgcacccaactgatcttcagcatcttttactttcaccagcgtttctgggtgagcaaaaacaggaaggcaaaatgccgcaaaaaagggaataagggcgacacggaaatgttgaatactcatattcttcctttttcaatattattgaagcatttatcagggttattgtctcatgagcggatacatatttgaatgtatttagaaaaataaacaaataggggtcagtgttacaaccaattaaccaattctgaacattatcgcgagcccatttatacctgaatatggctcataacaccccttgtttgcctggcggcagtagcgcggtggtcccacctgaccccatgccgaactcagaagtgaaacgccgtagcgccgatggtagtgtggggactccccatgcgagagtagggaactgccaggcatcaaataaaacgaaaggctcagtcgaaagactgggcctttcgcccgggctaattatggggtgtcgcccttattcgactctatagtgaagttcctattctctagtagtataggaacttctgaagtggggctcgagggccggcccagccgtcaaggttaaggctggccatatcagcgactgaaaagcggccagcctcggccttgtttgacgtataaccaaagccaccgggcaaccaatagcccttgtcacttttgatcaggtagaccgaccctgaagcgcttttttcgtattccataaaacccccttctgtgcgtgagtactcatagtataacaggcgtgagtaccaacgct

SEQ ID NO: 95 - DNA, 7934 bp, Artificial Sequence
  Synthetic vector
ctagattattaggcgaggccacgcgctttgagggtctgttcaaattcttcgaggcaacgttccgccacggcgagcatttcatccacttccgcacgggtcataacgagcggcggtgcagacacaatgtgatcgccgcacgcacgcataatgaggttgttgcgaaaaaaaatatcgcggcagagggtgccaatttcgccaaaatccggaaagagttcacgtttcgctttgtttttcacgagggtaaacgcctgcaccatgcccacgccacgcacatcatccacatgttcaaaacggctaaaggtttcacgccaacgtttctgcatatacgggccaatatcatctttcacacgctgcacaatgccttcatcacggagcgccgcaacattcgcatgcgccaccgccgcacacaccggatggccgctataggtaaagccatggttaaaatcaccgcccgcaatgagaccttccgcaacacgtttgcccacaaacaccgcgccaatcgggagatagccgctgctgaggcctttcgccgcggtaaagaggtccggctgaaagccaaaatgctgatggccaaaccattcgccggtacggccaaagccgcaaatcacttcatccgcaacgaggagcacatcatatttgcggcaaatacgttcaatttccggccaataggttgccggcggaacaatcacaccgcccgcaccctgaatcggttcgcccacaaacgccgccactttatccgcgccgatttcgagaattttttcttcgagccaacgcgccgcaaccacgccaaattcatccggggtcatatctttgccatgtttataccaccacggctgttcaatatgcgccatgcccggaatcgggagatcgccctgttcatgcatatatttcatgccgccgaggctcgcaccgccaatggtgctgccgtgatagccgttccaacggccaatgagggtttttttttccggtttgccctgcacatcccaataacgacgcaccatacgaatcatggtatccacgctttcgctgccgctgttggtataaaacacacgatcaaaacctgccggggtaacttcggcgaggaggctgctgagttccaccaccgccggatgggtggttttaaagaaggtgttataaaacgggagttcttccatctgacgacgcgccgcttccgcaaaatctttacggccatagcccacgttcacgcaccagaggcccgccatgccatcaataattttgttgccttcgctatcccagagatacacgccttcgccacgggtcatcacacgcgcacccgcctgattgaggctcgcggtatcggtaaacggatggagatgatgcgccgcatcgagttcacgccactgagaggtggtacgctgtttctgcatattatatctccttaaagcttcaggccgcagcctgttcgatcggggagaagggcagcccgaggctctcggccaccgccttgtatgttagccggccccgatggacgttgaggcctgcgcgcagatgtggattctcgagtacggcggaaaaacccttgttggccagagccaaaccaaacggcagggtcgcgttattcagtgcctggctcgaggttagcggcacggcacccggcatattggccacacaataatgaatgatgccatctacttcgtatgttggatcagcgtgagtggttgggcgcgatgtctcaaagcagccgccctgatcgatagcgacgtccacgagtacggctctcttgcgcattgagctcagcatgctccggcggaccagcttcggagcgcttgcccctgggacgagcaccgcaccaatcaccacgtccgccgcaaatacctcttcctccacggattcgatggtcgaaaacctagtgcgaacccgtccttcgaatagctcgtccagctcacggagccggatgatcgaacgatcgatgatggtcacctctgcgcccagaccagccgccatgcgcgcggcgtgcgtaccgacgaccccacctccaatcaccacgattcgggcaggctgaaccccgggcaccccaccgatcagcagccctcgcccccctgtactccgctttagagcgctacccgccgcttcgatcgaaagcctgcccgcgacctcgctcatcggcgccagcagtggaagaccaccatgagcatcagttacggtctcataggcgattgcaatgcatccagatttcaagaggccggcagcctgttccgggtccggggccaagtgcaaataggtgaacaggatttgatcctcacgcagctgggaccattcggccggctgaggctccttgacctttacgatcatctcgctcgatgcgaatacctcagctgccgaagttaagatcgttgcgccggcattgcgataatcgccatcggttgcaccaatgccagcgccggcattggtctcgatcatcacgcggtggcccgctgccacgtattcacgggcagctcctggggtaaggcccacgcgatattcgtgcgccttgatttcctttggaactccgaccttcattatgccactctccttggttcctagatcctgtgtgaaattgttattgttatccgctcacaattccacacattatacgagccggaagcataaagtgtcaagcctggggtgcctaatgagtgagctaacttacattaattgcgttgcgctcactgcccgcatatctatgagccgggctgaatgatcgaccgagacaggccctgcggggctgcaggatccaattgtgagcggataacaattacgagcttcatgcacagtgatcgacgctgttgacaattaatcatcggctcgtataatgtgtggatgtggaattgtgagcgctcacaattccacaacggtttccctctagaaataattttgtttacaaggaggattataaaatgactctagagtggaaaccgaaaccaaaactgcctcaactgctggatgatcacttcggtctgcacggtctggtgtttcgtcgtactttcgcaattcgttcttatgaagtgggtccagatcgttctacctccatcctggccgtcatgaaccacatgcaggaagccaccctgaatcacgcgaaatctgttggtatcctgggtgatggtttcggcactactctggaaatgtctaaacgtgacctgatgtgggtagtgcgtcgcacccacgtagcagtagagcgctaccctacttggggtgacactgtggaagtcgagtgttggattggcgcgtccggtaacaatggtatgcgtcgcgattttctggtccgtgactgtaaaacgggcgaaatcctgacgcgttgcacctccctgagcgttctgatgaacacccgcactcgtcgcctgtctaccatcccggacgaagtgcgcggtgagatcggtcctgctttcatcgataacgtggcagttaaagacgacgaaatcaagaaactgcaaaaactgaacgactccaccgcggactacatccagggcggtctgactccgcgctggaacgacctggatgttaatcagcatgtgaacaacctgaaatacgttgcttgggtcttcgagactgtgccggacagcattttcgaaagccatcacatttcctcttttactctggagtaccgtcgcgaatgtactcgcgactccgttctgcgcagcctgaccaccgtaagcggcggttctagcgaggcaggtctggtctgcgaccatctgctgcaactggaaggcggctccgaagtcctgcgtgcgcgtacggagtggcgtccaaagctgacggattctttccgcggcatctccgtaattccggcggaacctcgtgtttaagctttagtcaaaagcctccggtcggaggcttttgactttctgcttactgaatttgcggccgcctcgagaaaatgaagggaagttcctatacttactagagaataggaacttctatagggagtcgaataagggcgacacaaaaggtattctaaatgcataataaatactgataacatcttatagtttgtattatattttgtattatcgttgacatgtataattttgatatcaaaaactgattttccctttattattttcgagatttattttcttaattctctttaacaaactagaaatattgtatatacaaaaaatcataaataatagatgaatagtttaattataggtgttcatcaatcgaaaaagcaacgtatcttatttaaagtgcgttgcttttttctcatttataaggttaaataattctcatatatcaagcaaagtgacaggcgcccttaaatattctgacaaatgctctttccctaaactccccccataaaaaaacccgccgaagcgggtttttacgttatttgcggattaacgattactcgttatcagaaccgcccaggatgcctggcagttccctactctcgccgctgcgctcggtcgttcggctgcgggacctcagcgctagcggagtgtatactggcttactatgttggcactgatgagggtgtcagtgaagtgcttcatgtggcaggagaaaaaaggctgcaccggtgcgtcagcagaatatgtgatacaggatatattccgcttcctcgctcactgactcgctacgctcggtcgttcgactgcggcgagcggaaatggcttacgaacggggcggagatttcctggaagatgccaggaagatacttaacagggaagtgagagggccgcggcaaagccgtttttccataggctccgcccccctgacaagcatcacgaaatctgacgctcaaatcagtggtggcgaaacccgacaggactataaagataccaggcgtttccccctggcggctccctcgtgcgctctcctgttcctgcctttcggtttaccggtgtcattccgctgttatggccgcgtttgtctcattccacgcctgacactcagttccgggtaggcagttcgctccaagctggactgtatgcacgaaccccccgttcagtccgaccgctgcgccttatccggtaactatcgtcttgagtccaacccggaaagacatgcaaaagcaccactggcagcagccactggtaattgatttagaggagttagtcttgaagtcatgcgccggttaaggctaaactgaaaggacaagttttggtgactgcgctcctccaagccagttacctcggttcaaagagttggtagctcagagaaccttcgaaaaaccgccctgcaaggcggttttttcgttttcagagcaagagattacgcgcagaccaaaacgatctcaagaagatcatcttattaatcactgcccgctttccagtcgggaaacctgtcgtgccagctgcattaatgaatcggccaacgcgcggggagaggcggtttgcgtattgggcgccagggtggtttttcttttcaccagtgagactggcaacagctgattgcccttcaccgcctggccctgagagagttgcagcaagcggtccacgctggtttgccccagcaggcgaaaatcctgtttgatggtggttaacggcgggatataacatgagctatcttcggtatcgtcgtatcccactaccgagatatccgcaccaacgcgcagcccggactcggtaatggcgcgcattgcgcccagcgccatctgatcgttggcaaccagcatcgcagtgggaacgatgccctcattcagcatttgcatggtttgttgaaaaccggacatggcactccagtcgccttcccgttccgctatcggctgaatttgattgcgagtgagatatttatgccagccagccagacgcagacgcgccgagacagaacttaatgggcccgctaacagcgcgatttgctggtgacccaatgcgaccagatgctccacgcccagtcgcgtaccgtcctcatgggagaaaataatactgttgatgggtgtctggtcagagacatcaagaaataacgccggaacattagtgcaggcagcttccacagcaatggcatcctggtcatccagcggatagttaatgatcagcccactgacgcgttgcgcgagaagattgtgcaccgccgctttacaggcttcgacgccgcttcgttctaccatcgacaccaccacgctggcacccagttgatcggcgcgagatttaatcgccgcgacaatttgcgacggcgcgtgcagggccagactggaggtggcaacgccaatcagcaacgactgtttgcccgccagttgttgtgccacgcggttgggaatgtaattcagctccgccatcgccgcttccactttttcccgcgttttcgcagaaacgtggctggcctggttcaccacgcgggaaacggtctgataagagacaccggcatactctgcgacatcgtataacgttactggtttcatattcaccaccctgaattgactctcttccgggcgctatcatgccataccgcgaaaggttttgcgccattcgatggcgcgccgcttttaccaatgcttaatcagtgaggcacctatctcagcgatctgtctatttcgttcatccatagttgcctgactccccgtcgtgtagataactacgatacgggagggcttaccatctggccccagcgctgcgatgataccgcgagaaccacgctcaccggctccggatttatcagcaataaaccagccagccggaagggccgagcgcagaagtggtcctgcaactttatccgcctccatccagtctattaattgttgccgggaagctagagtaagtagttcgccagttaatagtttgcgcaacgttgttgccatcgctacaggcatcgtggtgtcacgctcgtcgtttggtatggcttcattcagctccggttcccaacgatcaaggcgagttacatgatcccccatgttgtgcaaaaaagcggttagctccttcggtcctccgatcgttgtcagaagtaagttggccgcagtgttatcactcatggttatggcagcactgcataattctcttactgtcatgccatccgtaagatgcttttctgtgactggtgagtactcaaccaagtcattctgagaatagtgtatgcggcgaccgagttgctcttgcccggcgtcaatacgggataataccgcgccacatagcagaactttaaaagtgctcatcattggaaaacgttcttcggggcgaaaactctcaaggatcttaccgctgttgagatccagttcgatgtaacccactcgtgcacccaactgatcttcagcatcttttactttcaccagcgtttctgggtgagcaaaaacaggaaggcaaaatgccgcaaaaaagggaataagggcgacacggaaatgttgaatactcatattcttcctttttcaatattattgaagcatttatcagggttattgtctcatgagcggatacatatttgaatgtatttagaaaaataaacaaataggggtcagtgttacaaccaattaaccaattctgaacattatcgcgagcccatttatacctgaatatggctcataacaccccttgtttgcctggcggcagtagcgcggtggtcccacctgaccccatgccgaactcagaagtgaaacgccgtagcgccgatggtagtgtggggactccccatgcgagagtagggaactgccaggcatcaaataaaacgaaaggctcagtcgaaagactgggcctttcgcccgggctaattatggggtgtcgcccttattcgactctatagtgaagttcctattctctagtagtataggaacttctgaagtggggctcgagggccggcccagccgtcaaggttaaggctggccatatcagcgactgaaaagcggccagcctcggccttgtttgacgtataaccaaagccaccgggcaaccaatagcccttgtcacttttgatcaggtagaccgaccctgaagcgcttttttcgtattccataaaacccccttctgtgcgtgagtactcatagtataacaggcgtgagtaccaacgct

SEQ ID NO: 96 - DNA, 7955 bp, Artificial Sequence
  Synthetic vector
ctagattattaggcgaggccacgcgctttgagggtctgttcaaattcttcgaggcaacgttccgccacggcgagcatttcatccacttccgcacgggtcataacgagcggcggtgcagacacaatgtgatcgccgcacgcacgcataatgaggttgttgcgaaaaaaaatatcgcggcagagggtgccaatttcgccaaaatccggaaagagttcacgtttcgctttgtttttcacgagggtaaacgcctgcaccatgcccacgccacgcacatcatccacatgttcaaaacggctaaaggtttcacgccaacgtttctgcatatacgggccaatatcatctttcacacgctgcacaatgccttcatcacggagcgccgcaacattcgcatgcgccaccgccgcacacaccggatggccgctataggtaaagccatggttaaaatcaccgcccgcaatgagaccttccgcaacacgtttgcccacaaacaccgcgccaatcgggagatagccgctgctgaggcctttcgccgcggtaaagaggtccggctgaaagccaaaatgctgatggccaaaccattcgccggtacggccaaagccgcaaatcacttcatccgcaacgaggagcacatcatatttgcggcaaatacgttcaatttccggccaataggttgccggcggaacaatcacaccgcccgcaccctgaatcggttcgcccacaaacgccgccactttatccgcgccgatttcgagaattttttcttcgagccaacgcgccgcaaccacgccaaattcatccggggtcatatctttgccatgtttataccaccacggctgttcaatatgcgccatgcccggaatcgggagatcgccctgttcatgcatatatttcatgccgccgaggctcgcaccgccaatggtgctgccgtgatagccgttccaacggccaatgagggtttttttttccggtttgccctgcacatcccaataacgacgcaccatacgaatcatggtatccacgctttcgctgccgctgttggtataaaacacacgatcaaaacctgccggggtaacttcggcgaggaggctgctgagttccaccaccgccggatgggtggttttaaagaaggtgttataaaacgggagttcttccatctgacgacgcgccgcttccgcaaaatctttacggccatagcccacgttcacgcaccagaggcccgccatgccatcaataattttgttgccttcgctatcccagagatacacgccttcgccacgggtcatcacacgcgcacccgcctgattgaggctcgcggtatcggtaaacggatggagatgatgcgccgcatcgagttcacgccactgagaggtggtacgctgtttctgcatattatatctccttaaagctttagatagaagctaattctttttcaagagctacgtctactgatacataatcataacctaaatcatgtgcaactgcttcgtacgtaatggctccgttggcaacgttcactcctaattttaacgcttcgttttgagcgattgctttgtgaacacctttagaagcaatttgaagtgcgtaaggtacggttacgtttgttaaagcaattgttgatgtgcgaggaactgctcccggcatatttgcaactgcatagtgtacaacgccgtgcttttcataagttggatgatcgtgtgttgtaatgtggtcgattgtttcaacgataccaccttggtcgattgctacgtcaacaataacagaacctggcttcattgttttcaccatttcttctgttactagttttggagcttttgcacctgggattaatactgcgccaatcactaaatctgactccgctactgcatccgcaatattataagggtttgacactagcgtattgatttggttgccaaagatatcgtctaattgacgtaagcgttcaggacttaaatcaataattgttacatcagcaccgagaccgattgcgatttttgcagcatttgtaccaacaccgccgcctccgataatcgttacttttccgcggctaactccaggaacacccgctagtaaaattccttttccaccgtttgatttttgaaggaattgtgcaccgatttgagcagccatacgtcctgctacttcgctcataggcgttaatagaggcaatgtacgatttactgctactgtttcataagcaatggctgttacgccgctatcttttaatgcttttgctagtgctggttcagctgctaagtgaaggtatgtgaataagataagacctggtctaaaatagccgtattcacttgctagtggttcttttactttcataaccatttcagcttgtgcccaaacgtcagctgctgtctcaacaatttcagctccagcctttacataatcttcgtttgtgaagttacttccaatacccgcttcattttcaattaatacacgatgacctgtaccaacaaatgatgctacgcctgctggtgtaatcgctactcggttttcgttgtttttgatttcttttggtacgccaataatcattatgccactctccttggttcctagatcctgtgtgaaattgttattgttatccgctcacaattccacacattatacgagccggaagcataaagtgtcaagcctggggtgcctaatgagtgagctaacttacattaattgcgttgcgctcactgcccgcatatctatgagccgggctgaatgatcgaccgagacaggccctgcggggctgcaggatccaattgtgagcggataacaattacgagcttcatgcacagtgatcgacgctgttgacaattaatcatcggctcgtataatgtgtggatgtggaattgtgagcgctcacaattccacaacggtttccctctagaaataattttgtttacaaggaggattataaaatgactctagagtggaaaccgaaaccaaaactgcctcaactgctggatgatcacttcggtctgcacggtctggtgtttcgtcgtactttcgcaattcgttcttatgaagtgggtccagatcgttctacctccatcctggccgtcatgaaccacatgcaggaagccaccctgaatcacgcgaaatctgttggtatcctgggtgatggtttcggcactactctggaaatgtctaaacgtgacctgatgtgggtagtgcgtcgcacccacgtagcagtagagcgctaccctacttggggtgacactgtggaagtcgagtgttggattggcgcgtccggtaacaatggtatgcgtcgcgattttctggtccgtgactgtaaaacgggcgaaatcctgacgcgttgcacctccctgagcgttctgatgaacacccgcactcgtcgcctgtctaccatcccggacgaagtgcgcggtgagatcggtcctgctttcatcgataacgtggcagttaaagacgacgaaatcaagaaactgcaaaaactgaacgactccaccgcggactacatccagggcggtctgactccgcgctggaacgacctggatgttaatcagcatgtgaacaacctgaaatacgttgcttgggtcttcgagactgtgccggacagcattttcgaaagccatcacatttcctcttttactctggagtaccgtcgcgaatgtactcgcgactccgttctgcgcagcctgaccaccgtaagcggcggttctagcgaggcaggtctggtctgcgaccatctgctgcaactggaaggcggctccgaagtcctgcgtgcgcgtacggagtggcgtccaaagctgacggattctttccgcggcatctccgtaattccggcggaacctcgtgtttaagctttagtcaaaagcctccggtcggaggcttttgactttctgcttactgaatttgcggccgcctcgagaaaatgaagggaagttcctatacttactagagaataggaacttctatagggagtcgaataagggcgacacaaaaggtattctaaatgcataataaatactgataacatcttatagtttgtattatattttgtattatcgttgacatgtataattttgatatcaaaaactgattttccctttattattttcgagatttattttcttaattctctttaacaaactagaaatattgtatatacaaaaaatcataaataatagatgaatagtttaattataggtgttcatcaatcgaaaaagcaacgtatcttatttaaagtgcgttgcttttttctcatttataaggttaaataattctcatatatcaagcaaagtgacaggcgcccttaaatattctgacaaatgctctttccctaaactccccccataaaaaaacccgccgaagcgggtttttacgttatttgcggattaacgattactcgttatcagaaccgcccaggatgcctggcagttccctactctcgccgctgcgctcggtcgttcggctgcgggacctcagcgctagcggagtgtatactggcttactatgttggcactgatgagggtgtcagtgaagtgcttcatgtggcaggagaaaaaaggctgcaccggtgcgtcagcagaatatgtgatacaggatatattccgcttcctcgctcactgactcgctacgctcggtcgttcgactgcggcgagcggaaatggcttacgaacggggcggagatttcctggaagatgccaggaagatacttaacagggaagtgagagggccgcggcaaagccgtttttccataggctccgcccccctgacaagcatcacgaaatctgacgctcaaatcagtggtggcgaaacccgacaggactataaagataccaggcgtttccccctggcggctccctcgtgcgctctcctgttcctgcctttcggtttaccggtgtcattccgctgttatggccgcgtttgtctcattccacgcctgacactcagttccgggtaggcagttcgctccaagctggactgtatgcacgaaccccccgttcagtccgaccgctgcgccttatccggtaactatcgtcttgagtccaacccggaaagacatgcaaaagcaccactggcagcagccactggtaattgatttagaggagttagtcttgaagtcatgcgccggttaaggctaaactgaaaggacaagttttggtgactgcgctcctccaagccagttacctcggttcaaagagttggtagctcagagaaccttcgaaaaaccgccctgcaaggcggttttttcgttttcagagcaagagattacgcgcagaccaaaacgatctcaagaagatcatcttattaatcactgcccgctttccagtcgggaaacctgtcgtgccagctgcattaatgaatcggccaacgcgcggggagaggcggtttgcgtattgggcgccagggtggtttttcttttcaccagtgagactggcaacagctgattgcccttcaccgcctggccctgagagagttgcagcaagcggtccacgctggtttgccccagcaggcgaaaatcctgtttgatggtggttaacggcgggatataacatgagctatcttcggtatcgtcgtatcccactaccgagatatccgcaccaacgcgcagcccggactcggtaatggcgcgcattgcgcccagcgccatctgatcgttggcaaccagcatcgcagtgggaacgatgccctcattcagcatttgcatggtttgttgaaaaccggacatggcactccagtcgccttcccgttccgctatcggctgaatttgattgcgagtgagatatttatgccagccagccagacgcagacgcgccgagacagaacttaatgggcccgctaacagcgcgatttgctggtgacccaatgcgaccagatgctccacgcccagtcgcgtaccgtcctcatgggagaaaataatactgttgatgggtgtctggtcagagacatcaagaaataacgccggaacattagtgcaggcagcttccacagcaatggcatcctggtcatccagcggatagttaatgatcagcccactgacgcgttgcgcgagaagattgtgcaccgccgctttacaggcttcgacgccgcttcgttctaccatcgacaccaccacgctggcacccagttgatcggcgcgagatttaatcgccgcgacaatttgcgacggcgcgtgcagggccagactggaggtggcaacgccaatcagcaacgactgtttgcccgccagttgttgtgccacgcggttgggaatgtaattcagctccgccatcgccgcttccactttttcccgcgttttcgcagaaacgtggctggcctggttcaccacgcgggaaacggtctgataagagacaccggcatactctgcgacatcgtataacgttactggtttcatattcaccaccctgaattgactctcttccgggcgctatcatgccataccgcgaaaggttttgcgccattcgatggcgcgccgcttttaccaatgcttaatcagtgaggcacctatctcagcgatctgtctatttcgttcatccatagttgcctgactccccgtcgtgtagataactacgatacgggagggcttaccatctggccccagcgctgcgatgataccgcgagaaccacgctcaccggctccggatttatcagcaataaaccagccagccggaagggccgagcgcagaagtggtcctgcaactttatccgcctccatccagtctattaattgttgccgggaagctagagtaagtagttcgccagttaatagtttgcgcaacgttgttgccatcgctacaggcatcgtggtgtcacgctcgtcgtttggtatggcttcattcagctccggttcccaacgatcaaggcgagttacatgatcccccatgttgtgcaaaaaagcggttagctccttcggtcctccgatcgttgtcagaagtaagttggccgcagtgttatcactcatggttatggcagcactgcataattctcttactgtcatgccatccgtaagatgcttttctgtgactggtgagtactcaaccaagtcattctgagaatagtgtatgcggcgaccgagttgctcttgcccggcgtcaatacgggataataccgcgccacatagcagaactttaaaagtgctcatcattggaaaacgttcttcggggcgaaaactctcaaggatcttaccgctgttgagatccagttcgatgtaacccactcgtgcacccaactgatcttcagcatcttttactttcaccagcgtttctgggtgagcaaaaacaggaaggcaaaatgccgcaaaaaagggaataagggcgacacggaaatgttgaatactcatattcttcctttttcaatattattgaagcatttatcagggttattgtctcatgagcggatacatatttgaatgtatttagaaaaataaacaaataggggtcagtgttacaaccaattaaccaattctgaacattatcgcgagcccatttatacctgaatatggctcataacaccccttgtttgcctggcggcagtagcgcggtggtcccacctgaccccatgccgaactcagaagtgaaacgccgtagcgccgatggtagtgtggggactccccatgcgagagtagggaactgccaggcatcaaataaaacgaaaggctcagtcgaaagactgggcctttcgcccgggctaattatggggtgtcgcccttattcgactctatagtgaagttcctattctctagtagtataggaacttctgaagtggggctcgagggccggcccagccgtcaaggttaaggctggccatatcagcgactgaaaagcggccagcctcggccttgtttgacgtataaccaaagccaccgggcaaccaatagcccttgtcacttttgatcaggtagaccgaccctgaagcgcttttttcgtattccataaaacccccttctgtgcgtgagtactcatagtataacaggcgtgagtaccaacgct

SEQ ID NO: 97 - DNA, 7208 bp, Artificial Sequence
  Synthetic vector
ctagattattaggcgaggccacgcgctttgagggtctgttcaaattcttcgaggcaacgttccgccacggcgagcatttcatccacttccgcacgggtcataacgagcggcggtgcagacacaatgtgatcgccgcacgcacgcataatgaggttgttgcgaaaaaaaatatcgcggcagagggtgccaatttcgccaaaatccggaaagagttcacgtttcgctttgtttttcacgagggtaaacgcctgcaccatgcccacgccacgcacatcatccacatgttcaaaacggctaaaggtttcacgccaacgtttctgcatatacgggccaatatcatctttcacacgctgcacaatgccttcatcacggagcgccgcaacattcgcatgcgccaccgccgcacacaccggatggccgctataggtaaagccatggttaaaatcaccgcccgcaatgagaccttccgcaacacgtttgcccacaaacaccgcgccaatcgggagatagccgctgctgaggcctttcgccgcggtaaagaggtccggctgaaagccaaaatgctgatggccaaaccattcgccggtacggccaaagccgcaaatcacttcatccgcaacgaggagcacatcatatttgcggcaaatacgttcaatttccggccaataggttgccggcggaacaatcacaccgcccgcaccctgaatcggttcgcccacaaacgccgccactttatccgcgccgatttcgagaattttttcttcgagccaacgcgccgcaaccacgccaaattcatccggggtcatatctttgccatgtttataccaccacggctgttcaatatgcgccatgcccggaatcgggagatcgccctgttcatgcatatatttcatgccgccgaggctcgcaccgccaatggtgctgccgtgatagccgttccaacggccaatgagggtttttttttccggtttgccctgcacatcccaataacgacgcaccatacgaatcatggtatccacgctttcgctgccgctgttggtataaaacacacgatcaaaacctgccggggtaacttcggcgaggaggctgctgagttccaccaccgccggatgggtggttttaaagaaggtgttataaaacgggagttcttccatctgacgacgcgccgcttccgcaaaatctttacggccatagcccacgttcacgcaccagaggcccgccatgccatcaataattttgttgccttcgctatcccagagatacacgccttcgccacgggtcatcacacgcgcacccgcctgattgaggctcgcggtatcggtaaacggatggagatgatgcgccgcatcgagttcacgccactgagaggtggtacgctgtttctgcatattatatctccttaaagctttaagcacccgccacagatgattcatcctgtaaagctttctcggcaggaacatactcatagcctagatctcttgctacagcttcataggtcacgtgtccgtttgcggtgtttgtaaacagcacaagtcctttgcgaaaataaacatattcttccggcagcggttcttttactttcatgaccatttcggcgtcccagacctgcttcggatcagcaatgatttccgctcctgctgactcataggcttcattttcaaatccgcttccaaggcccgcgcctgtttcaaccagcacccggtggccgtttgaaatgagctgagaaacgcccccgggtgttaatgcgacacggttttcattgttttttatctctttaggaacccctatgatcattatgccactctccttggttcctagatcctgtgtgaaattgttattgttatccgctcacaattccacacattatacgagccggaagcataaagtgtcaagcctggggtgcctaatgagtgagctaacttacattaattgcgttgcgctcactgcccgcatatctatgagccgggctgaatgatcgaccgagacaggccctgcggggctgcaggatccaattgtgagcggataacaattacgagcttcatgcacagtgatcgacgctgttgacaattaatcatcggctcgtataatgtgtggatgtggaattgtgagcgctcacaattccacaacggtttccctctagaaataattttgtttacaaggaggattataaaatgactctagagtggaaaccgaaaccaaaactgcctcaactgctggatgatcacttcggtctgcacggtctggtgtttcgtcgtactttcgcaattcgttcttatgaagtgggtccagatcgttctacctccatcctggccgtcatgaaccacatgcaggaagccaccctgaatcacgcgaaatctgttggtatcctgggtgatggtttcggcactactctggaaatgtctaaacgtgacctgatgtgggtagtgcgtcgcacccacgtagcagtagagcgctaccctacttggggtgacactgtggaagtcgagtgttggattggcgcgtccggtaacaatggtatgcgtcgcgattttctggtccgtgactgtaaaacgggcgaaatcctgacgcgttgcacctccctgagcgttctgatgaacacccgcactcgtcgcctgtctaccatcccggacgaagtgcgcggtgagatcggtcctgctttcatcgataacgtggcagttaaagacgacgaaatcaagaaactgcaaaaactgaacgactccaccgcggactacatccagggcggtctgactccgcgctggaacgacctggatgttaatcagcatgtgaacaacctgaaatacgttgcttgggtcttcgagactgtgccggacagcattttcgaaagccatcacatttcctcttttactctggagtaccgtcgcgaatgtactcgcgactccgttctgcgcagcctgaccaccgtaagcggcggttctagcgaggcaggtctggtctgcgaccatctgctgcaactggaaggcggctccgaagtcctgcgtgcgcgtacggagtggcgtccaaagctgacggattctttccgcggcatctccgtaattccggcggaacctcgtgtttaagctttagtcaaaagcctccggtcggaggcttttgactttctgcttactgaatttgcggccgcctcgagaaaatgaagggaagttcctatacttactagagaataggaacttctatagggagtcgaataagggcgacacaaaaggtattctaaatgcataataaatactgataacatcttatagtttgtattatattttgtattatcgttgacatgtataattttgatatcaaaaactgattttccctttattattttcgagatttattttcttaattctctttaacaaactagaaatattgtatatacaaaaaatcataaataatagatgaatagtttaattataggtgttcatcaatcgaaaaagcaacgtatcttatttaaagtgcgttgcttttttctcatttataaggttaaataattctcatatatcaagcaaagtgacaggcgcccttaaatattctgacaaatgctctttccctaaactccccccataaaaaaacccgccgaagcgggtttttacgttatttgcggattaacgattactcgttatcagaaccgcccaggatgcctggcagttccctactctcgccgctgcgctcggtcgttcggctgcgggacctcagcgctagcggagtgtatactggcttactatgttggcactgatgagggtgtcagtgaagtgcttcatgtggcaggagaaaaaaggctgcaccggtgcgtcagcagaatatgtgatacaggatatattccgcttcctcgctcactgactcgctacgctcggtcgttcgactgcggcgagcggaaatggcttacgaacggggcggagatttcctggaagatgccaggaagatacttaacagggaagtgagagggccgcggcaaagccgtttttccataggctccgcccccctgacaagcatcacgaaatctgacgctcaaatcagtggtggcgaaacccgacaggactataaagataccaggcgtttccccctggcggctccctcgtgcgctctcctgttcctgcctttcggtttaccggtgtcattccgctgttatggccgcgtttgtctcattccacgcctgacactcagttccgggtaggcagttcgctccaagctggactgtatgcacgaaccccccgttcagtccgaccgctgcgccttatccggtaactatcgtcttgagtccaacccggaaagacatgcaaaagcaccactggcagcagccactggtaattgatttagaggagttagtcttgaagtcatgcgccggttaaggctaaactgaaaggacaagttttggtgactgcgctcctccaagccagttacctcggttcaaagagttggtagctcagagaaccttcgaaaaaccgccctgcaaggcggttttttcgttttcagagcaagagattacgcgcagaccaaaacgatctcaagaagatcatcttattaatcactgcccgctttccagtcgggaaacctgtcgtgccagctgcattaatgaatcggccaacgcgcggggagaggcggtttgcgtattgggcgccagggtggtttttcttttcaccagtgagactggcaacagctgattgcccttcaccgcctggccctgagagagttgcagcaagcggtccacgctggtttgccccagcaggcgaaaatcctgtttgatggtggttaacggcgggatataacatgagctatcttcggtatcgtcgtatcccactaccgagatatccgcaccaacgcgcagcccggactcggtaatggcgcgcattgcgcccagcgccatctgatcgttggcaaccagcatcgcagtgggaacgatgccctcattcagcatttgcatggtttgttgaaaaccggacatggcactccagtcgccttcccgttccgctatcggctgaatttgattgcgagtgagatatttatgccagccagccagacgcagacgcgccgagacagaacttaatgggcccgctaacagcgcgatttgctggtgacccaatgcgaccagatgctccacgcccagtcgcgtaccgtcctcatgggagaaaataatactgttgatgggtgtctggtcagagacatcaagaaataacgccggaacattagtgcaggcagcttccacagcaatggcatcctggtcatccagcggatagttaatgatcagcccactgacgcgttgcgcgagaagattgtgcaccgccgctttacaggcttcgacgccgcttcgttctaccatcgacaccaccacgctggcacccagttgatcggcgcgagatttaatcgccgcgacaatttgcgacggcgcgtgcagggccagactggaggtggcaacgccaatcagcaacgactgtttgcccgccagttgttgtgccacgcggttgggaatgtaattcagctccgccatcgccgcttccactttttcccgcgttttcgcagaaacgtggctggcctggttcaccacgcgggaaacggtctgataagagacaccggcatactctgcgacatcgtataacgttactggtttcatattcaccaccctgaattgactctcttccgggcgctatcatgccataccgcgaaaggttttgcgccattcgatggcgcgccgcttttaccaatgcttaatcagtgaggcacctatctcagcgatctgtctatttcgttcatccatagttgcctgactccccgtcgtgtagataactacgatacgggagggcttaccatctggccccagcgctgcgatgataccgcgagaaccacgctcaccggctccggatttatcagcaataaaccagccagccggaagggccgagcgcagaagtggtcctgcaactttatccgcctccatccagtctattaattgttgccgggaagctagagtaagtagttcgccagttaatagtttgcgcaacgttgttgccatcgctacaggcatcgtggtgtcacgctcgtcgtttggtatggcttcattcagctccggttcccaacgatcaaggcgagttacatgatcccccatgttgtgcaaaaaagcggttagctccttcggtcctccgatcgttgtcagaagtaagttggccgcagtgttatcactcatggttatggcagcactgcataattctcttactgtcatgccatccgtaagatgcttttctgtgactggtgagtactcaaccaagtcattctgagaatagtgtatgcggcgaccgagttgctcttgcccggcgtcaatacgggataataccgcgccacatagcagaactttaaaagtgctcatcattggaaaacgttcttcggggcgaaaactctcaaggatcttaccgctgttgagatccagttcgatgtaacccactcgtgcacccaactgatcttcagcatcttttactttcaccagcgtttctgggtgagcaaaaacaggaaggcaaaatgccgcaaaaaagggaataagggcgacacggaaatgttgaatactcatattcttcctttttcaatattattgaagcatttatcagggttattgtctcatgagcggatacatatttgaatgtatttagaaaaataaacaaataggggtcagtgttacaaccaattaaccaattctgaacattatcgcgagcccatttatacctgaatatggctcataacaccccttgtttgcctggcggcagtagcgcggtggtcccacctgaccccatgccgaactcagaagtgaaacgccgtagcgccgatggtagtgtggggactccccatgcgagagtagggaactgccaggcatcaaataaaacgaaaggctcagtcgaaagactgggcctttcgcccgggctaattatggggtgtcgcccttattcgactctatagtgaagttcctattctctagtagtataggaacttctgaagtggggctcgagggccggcccagccgtcaaggttaaggctggccatatcagcgactgaaaagcggccagcctcggccttgtttgacgtataaccaaagccaccgggcaaccaatagcccttgtcacttttgatcaggtagaccgaccctgaagcgcttttttcgtattccataaaacccccttctgtgcgtgagtactcatagtataacaggcgtgagtaccaacgct

SEQ ID NO: 98 - DNA, 5384 bp, Artificial Sequence
  Synthetic vector
gtaaacagcacaagtcctttgcgaaaataaacatattcttccggcagcggttcttttactttcatgaccatttcggcgtcccagacctgcttcggatcagcaatgatttccgctcctgctgactcataggcttcattttcaaatccgcttccaaggcccgcgcctgtttcaaccagcacccggtggccgtttgaaatgagctgagaaacgcccccgggtgttaatgcgacacggttttcattgttttttatctctttaggaacccctatgatcattatgccactctccttggttcctagatcctgtgtgaaattgttattgttatccgctcacaattccacacattatacgagccggaagcataaagtgtcaagcctggggtgcctaatgagtgagctaacttacattaattgcgttgcgctcactgcccgcatatctatgagccgggctgaatgatcgaccgagacaggccctgcggggctgcaggatccaattgtgagcggataacaattacgagcttcatgcacagtgatcgacgctgttgacaattaatcatcggctcgtataatgtgtggatgtggaattgtgagcgctcacaattccacaacggtttccctctagaaataattttgtttacaaggaggattataaaatgactctagagtggaaaccgaaaccaaaactgcctcaactgctggatgatcacttcggtctgcacggtctggtgtttcgtcgtactttcgcaattcgttcttatgaagtgggtccagatcgttctacctccatcctggccgtcatgaaccacatgcaggaagccaccctgaatcacgcgaaatctgttggtatcctgggtgatggtttcggcactactctggaaatgtctaaacgtgacctgatgtgggtagtgcgtcgcacccacgtagcagtagagcgctaccctacttggggtgacactgtggaagtcgagtgttggattggcgcgtccggtaacaatggtatgcgtcgcgattttctggtccgtgactgtaaaacgggcgaaatcctgacgcgttgcacctccctgagcgttctgatgaacacccgcactcgtcgcctgtctaccatcccggacgaagtgcgcggtgagatcggtcctgctttcatcgataacgtggcagttaaagacgacgaaatcaagaaactgcaaaaactgaacgactccaccgcggactacatccagggcggtctgactccgcgctggaacgacctggatgttaatcagcatgtgaacaacctgaaatacgttgcttgggtcttcgagactgtgccggacagcattttcgaaagccatcacatttcctcttttactctggagtaccgtcgcgaatgtactcgcgactccgttctgcgcagcctgaccaccgtaagcggcggttctagcgaggcaggtctggtctgcgaccatctgctgcaactggaaggcggctccgaagtcctgcgtgcgcgtacggagtggcgtccaaagctgacggattctttccgcggcatctccgtaattccggcggaacctcgtgtttaagctttagtcaaaagcctccggtcggaggcttttgactttctgcttactgaatttgcggccgcctcgagaaaatgaagggaagttcctatacttactagagaataggaacttctatagggagtcgaataagggcgacacaaaaggtattctaaatgcataataaatactgataacatcttatagtttgtattatattttgtattatcgttgacatgtataattttgatatcaaaaactgattttccctttattattttcgagatttattttcttaattctctttaacaaactagaaatattgtatatacaaaaaatcataaataatagatgaatagtttaattataggtgttcatcaatcgaaaaagcaacgtatcttatttaaagtgcgttgcttttttctcatttataaggttaaataattctcatatatcaagcaaagtgacaggcgcccttaaatattctgacaaatgctctttccctaaactccccccataaaaaaacccgccgaagcgggtttttacgttatttgcggattaacgattactcgttatcagaaccgcccaggatgcctggcagttccctactctcgccgctgcgctcggtcgttcggctgcgggacctcagcgctagcggagtgtatactggcttactatgttggcactgatgagggtgtcagtgaagtgcttcatgtggcaggagaaaaaaggctgcaccggtgcgtcagcagaatatgtgatacaggatatattccgcttcctcgctcactgactcgctacgctcggtcgttcgactgcggcgagcggaaatggcttacgaacggggcggagatttcctggaagatgccaggaagatacttaacagggaagtgagagggccgcggcaaagccgtttttccataggctccgcccccctgacaagcatcacgaaatctgacgctcaaatcagtggtggcgaaacccgacaggactataaagataccaggcgtttccccctggcggctccctcgtgcgctctcctgttcctgcctttcggtttaccggtgtcattccgctgttatggccgcgtttgtctcattccacgcctgacactcagttccgggtaggcagttcgctccaagctggactgtatgcacgaaccccccgttcagtccgaccgctgcgccttatccggtaactatcgtcttgagtccaacccggaaagacatgcaaaagcaccactggcagcagccactggtaattgatttagaggagttagtcttgaagtcatgcgccggttaaggctaaactgaaaggacaagttttggtgactgcgctcctccaagccagttacctcggttcaaagagttggtagctcagagaaccttcgaaaaaccgccctgcaaggcggttttttcgttttcagagcaagagattacgcgcagaccaaaacgatctcaagaagatcatcttattaatcactgcccgctttccagtcgggaaacctgtcgtgccagctgcattaatgaatcggccaacgcgcggggagaggcggtttgcgtattgggcgccagggtggtttttcttttcaccagtgagactggcaacagctgattgcccttcaccgcctggccctgagagagttgcagcaagcggtccacgctggtttgccccagcaggcgaaaatcctgtttgatggtggttaacggcgggatataacatgagctatcttcggtatcgtcgtatcccactaccgagatatccgcaccaacgcgcagcccggactcggtaatggcgcgcattgcgcccagcgccatctgatcgttggcaaccagcatcgcagtgggaacgatgccctcattcagcatttgcatggtttgttgaaaaccggacatggcactccagtcgccttcccgttccgctatcggctgaatttgattgcgagtgagatatttatgccagccagccagacgcagacgcgccgagacagaacttaatgggcccgctaacagcgcgatttgctggtgacccaatgcgaccagatgctccacgcccagtcgcgtaccgtcctcatgggagaaaataatactgttgatgggtgtctggtcagagacatcaagaaataacgccggaacattagtgcaggcagcttccacagcaatggcatcctggtcatccagcggatagttaatgatcagcccactgacgcgttgcgcgagaagattgtgcaccgccgctttacaggcttcgacgccgcttcgttctaccatcgacaccaccacgctggcacccagttgatcggcgcgagatttaatcgccgcgacaatttgcgacggcgcgtgcagggccagactggaggtggcaacgccaatcagcaacgactgtttgcccgccagttgttgtgccacgcggttgggaatgtaattcagctccgccatcgccgcttccactttttcccgcgttttcgcagaaacgtggctggcctggttcaccacgcgggaaacggtctgataagagacaccggcatactctgcgacatcgtataacgttactggtttcatattcaccaccctgaattgactctcttccgggcgctatcatgccataccgcgaaaggttttgcgccattcgatggcgcgccgcttttaccaatgcttaatcagtgaggcacctatctcagcgatctgtctatttcgttcatccatagttgcctgactccccgtcgtgtagataactacgatacgggagggcttaccatctggccccagcgctgcgatgataccgcgagaaccacgctcaccggctccggatttatcagcaataaaccagccagccggaagggccgagcgcagaagtggtcctgcaactttatccgcctccatccagtctattaattgttgccgggaagctagagtaagtagttcgccagttaatagtttgcgcaacgttgttgccatcgctacaggcatcgtggtgtcacgctcgtcgtttggtatggcttcattcagctccggttcccaacgatcaaggcgagttacatgatcccccatgttgtgcaaaaaagcggttagctccttcggtcctccgatcgttgtcagaagtaagttggccgcagtgttatcactcatggttatggcagcactgcataattctcttactgtcatgccatccgtaagatgcttttctgtgactggtgagtactcaaccaagtcattctgagaatagtgtatgcggcgaccgagttgctcttgcccggcgtcaatacgggataataccgcgccacatagcagaactttaaaagtgctcatcattggaaaacgttcttcggggcgaaaactctcaaggatcttaccgctgttgagatccagttcgatgtaacccactcgtgcacccaactgatcttcagcatcttttactttcaccagcgtttctgggtgagcaaaaacaggaaggcaaaatgccgcaaaaaagggaataagggcgacacggaaatgttgaatactcatattcttcctttttcaatattattgaagcatttatcagggttattgtctcatgagcggatacatatttgaatgtatttagaaaaataaacaaataggggtcagtgttacaaccaattaaccaattctgaacattatcgcgagcccatttatacctgaatatggctcataacaccccttgtttgcctggcggcagtagcgcggtggtcccacctgaccccatgccgaactcagaagtgaaacgccgtagcgccgatggtagtgtggggactccccatgcgagagtagggaactgccaggcatcaaataaaacgaaaggctcagtcgaaagactgggcctttcgccc

SEQ ID NO: 99 - DNA, 1107 bp, Mycobacterium marinum
  CDS (1)..(1107)
atgccaagagagattagattaccagaatcgtcagtagtagtaagaccagcaccgatggagagcgcgacctatagccaatccagccgtctgcaggcagcgggtctgagcccggcaattaccttgttcgagaaagcggcccagacggttccgctgccggacgcaccgcaaccggtggtcattgccgactacggtgtggcgaccggccacaacagcctgaagccgatgatggcggcgatcaacgcgctgcgtcgccgcatccgtgaagatcgtgctattatggtggcccacaccgacgtgccggacaacgactttacggcgctgttccgtaccttggcagatgatccggacagctatctgcaccatgatagcgcaagcttcgcgagcgcggtgggtcgcagcttttacacgcaaatcctgccgagcaatactgttagcctgggctggtcctcttgggcgatccagtggctgtctcgcatccctgccggtgcgccggaactgactgaccatgtccaagtcgcttacagcaaggatgagcgtgcgcgtgcggcctatgcgcatcaggcagcgaccgactggcaagacttcctggcttttcgtggccgtgaactgtgcccgggtggccgtctggtcgtcctgaccatggcgctggatgagcacggccactttggttaccgcccgatgaatgacgctctggttgcggcactgaatgaccaggttcgtgatggcctgttgcgtccggaagagttgcgccgcatggcgattccggttgtggctcgtgcggagaaagatctgcgcgcaccgttcgcaccgcgtggttggtttgagggtctgacgatcgaacaactggatgtgtttaacgccgaggatcgcttctgggcggcttttcagagcgatggtgacgcagagagcttcggtgcgcagtgggctggcttcgcacgtgcagccctgttcccgaccctggcagccgccctggactgtggcacgggtgacccgcgtgcgaccgcgtttattgagcagctggaagcgtccgttgcggatcgcctggcatctcaacctgaaccgatgcgtatcccgttggccagcttggttctggcgaaacgtgcctaa

SEQ ID NO: 100 - protein, 368 aa, Mycobacterium marinum
MPREIRLPESSVVVRPAPMESATYSQSSRLQAAGLSPAITLFEKAAQTVPLPDAPQPVVIADYGVATGHNSLKPMMAAINALRRRIREDRAIMVAHTDVPDNDFTALFRTLADDPDSYLHHDSASFASAVGRSFYTQILPSNTVSLGWSSWAIQWLSRIPAGAPELTDHVQVAYSKDERARAAYAHQAATDWQDFLAFRGRELCPGGRLVVLTMALDEHGHFGYRPMNDALVAALNDQVRDGLLRPEELRRMAIPVVARAEKDLRAPFAPRGWFEGLTIEQLDVFNAEDRFWAAFQSDGDAESFGAQWAGFARAALFPTLAAALDCGTGDPRATAFIEQLEASVADRLASQPEPMRIPLASLVLAKRA

SEQ ID NO: 101 - DNA, 552 bp, Escherichia coli
  CDS (1)..(552)
atggcggacacgttattgattctgggtgattgtctgagcgccgggtatcgaatgtctgccagcgcggcctggcctgccttgttgaatgataagtggcagagtaaaacgtcggtagttaatgccagcatcagcggcgacacctcgcaacaaggactggcgcgccttccggctctgctgaaacagcatcagccgcgttgggtgctggttgaactgggcggcaatgacggtttgcgtggttttcagccacagcaaaccgagcaaacgctgcgccagattttgcaggatgtcaaagccgccaacgctgaaccattgttaatgcaaatacgtctgcctgcaaactatggtcgccgttataatgaagcctttagcgccatttaccccaaactcgccaaagagtttgatgttccgctgctgcccttttttatggaagaggtctacctcaagccacaatggatgcaggatgacggtattcatcccaaccgcgacgcccagccgtttattgccgactggatggcgaagcagttgcagcctttagtaaatcatgactcataa

SEQ ID NO: 102 - protein, 183 aa, Escherichia coli
MADTLLILGDCLSAGYRMSASAAWPALLNDKWQSKTSVVNASISGDTSQQGLARLPALLKQHQPRWVLVELGGNDGLRGFQPQQTEQTLRQILQDVKAANAEPLLMQIRLPANYGRRYNEAFSAIYPKLAKEFDVPLLPFFMEEVYLKPQWMQDDGIHPNRDAQPFIADWMAKQLQPLVNHDS

SEQ ID NO: 103 - DNA, 5161 bp, Artificial Sequence
  Synthetic vector
cgggatctcgacgctctcccttatgcgactcctgcgtttagggaaagagcatttgtcagaatatttaagggcgcctgtcactttgcttgatatatgagaattatttaaccttataaatgagaaaaaagcaacgcactttaaataagatacgttgctttttcgattgatgaacacctataattaaactattcatctattatttatgattttttgtatatacaatatttctagtttgttaaagagaattaagaaaataaatctcgaaaataataaagggaaaatcagtttttgatatcaaaattatacatgtcaacgataatacaaaatataatacaaactataagatgttatcagtatttattatgcatttagaataccttttgtgtcgcccttattcgactccctatagaagttcctattctctagaaagtataggaacttcccttcattttggatccaattgtgagcggataacaattacgagcttcatgcacagtgatcgacgctgttgacaattaatcatcggctcgtataatgtgtggatgtggaattgtgagcgctcacaattccacaacggtttccctctagaaataattttgtttaacaggaggtaaaacatatgccaagagagattagattaccagaatcgtcagtagtagtaagaccagcaccgatggagagcgcgacctatagccaatccagccgtctgcaggcagcgggtctgagcccggcaattaccttgttcgagaaagcggcccagacggttccgctgccggacgcaccgcaaccggtggtcattgccgactacggtgtggcgaccggccacaacagcctgaagccgatgatggcggcgatcaacgcgctgcgtcgccgcatccgtgaagatcgtgctattatggtggcccacaccgacgtgccggacaacgactttacggcgctgttccgtaccttggcagatgatccggacagctatctgcaccatgatagcgcaagcttcgcgagcgcggtgggtcgcagcttttacacgcaaatcctgccgagcaatactgttagcctgggctggtcctcttgggcgatccagtggctgtctcgcatccctgccggtgcgccggaactgactgaccatgtccaagtcgcttacagcaaggatgagcgtgcgcgtgcggcctatgcgcatcaggcagcgaccgactggcaagacttcctggcttttcgtggccgtgaactgtgcccgggtggccgtctggtcgtcctgaccatggcgctggatgagcacggccactttggttaccgcccgatgaatgacgctctggttgcggcactgaatgaccaggttcgtgatggcctgttgcgtccggaagagttgcgccgcatggcgattccggttgtggctcgtgcggagaaagatctgcgcgcaccgttcgcaccgcgtggttggtttgagggtctgacgatcgaacaactggatgtgtttaacgccgaggatcgcttctgggcggcttttcagagcgatggtgacgcagagagcttcggtgcgcagtgggctggcttcgcacgtgcagccctgttcccgaccctggcagccgccctggactgtggcacgggtgacccgcgtgcgaccgcgtttattgagcagctggaagcgtccgttgcggatcgcctggcatctcaacctgaaccgatgcgtatcccgttggccagcttggttctggcgaaacgtgcctaagcgttaagtcagtcgtcagacgccggttaatccggcgttttttttgacgcccactaaagagaaaacaatctcgagtctggtaaagaaaccgctgctgcgaaatttgaacgccagcacatggactcgtctactagcgcagcttaattaacctaggctgctgccaccgctgagcaataactagcataaccccttggggcctctaaacgggtcttgaggggttttttgctgaaacctcaggcatttgagaagcacacggtcacactgcttccggtagtcaataaaccggtaaaccagcaatagacataagcggctatttaacgaccctgccctgaaccgacgaccgggtcatcgtggccggatcttgcggcccctcggcttgaacgaattgttagacattatttgccgactaccttggtgatctcgcctttcacgtagtggacaaattcttccaactgatctgcgcgcgaggccaagcgatcttcttcttgtccaagataagcctgtctagcttcaagtatgacgggctgatactgggccggcaggcgctccattgcccagtcggcagcgacatccttcggcgcgattttgccggttactgcgctgtaccaaatgcgggacaacgtaagcactacatttcgctcatcgccagcccagtcgggcggcgagttccatagcgttaaggtttcatttagcgcctcaaatagatcctgttcaggaaccggatcaaagagttcctccgccgctggacctaccaaggcaacgctatgttctcttgcttttgtcagcaagatagccagatcaatgtcgatcgtggctggctcgaagatacctgcaagaatgtcattgcgctgccattctccaaattgcagttcgcgcttagctggataacgccacggaatgatgtcgtcgtgcacaacaatggtgacttctacagcgcggagaatctcgctctctccaggggaagccgaagtttccaaaaggtcgttgatcaaagctcgccgcgttgtttcatcaagccttacggtcaccgtaaccagcaaatcaatatcactgtgtggcttcaggccgccatccactgcggagccgtacaaatgtacggccagcaacgtcggttcgagatggcgctcgatgacgccaactacctctgatagttgagtcgatacttcggcgatcaccgcttccctcatactcttcctttttcaatattattgaagcatttatcagggttattgtctcatgagcggatacatatttgaatgtatttagaaaaataaacaaatagctagctcactcggtcgctacgctccgggcgtgagactgcggcgggcgctgcggacacatacaaagttacccacagattccgtggataagcaggggactaacatgtgaggcaaaacagcagggccgcgccggtggcgtttttccataggctccgccctcctgccagagttcacataaacagacgcttttccggtgcatctgtgggagccgtgaggctcaaccatgaatctgacagtacgggcgaaacccgacaggacttaaagatccccaccgtttccggcgggtcgctccctcttgcgctctcctgttccgaccctgccgtttaccggatacctgttccgcctttctcccttacgggaagtgtggcgctttctcatagctcacacactggtatctcggctcggtgtaggtcgttcgctccaagctgggctgtaagcaagaactccccgttcagcccgactgctgcgccttatccggtaactgttcacttgagtccaacccggaaaagcacggtaaaacgccactggcagcagccattggtaactgggagttcgcagaggatttgtttagctaaacacgcggttgctcttgaagtgtgcgccaaagtccggctacactggaaggacagatttggttgctgtgctctgcgaaagccagttaccacggttaagcagttccccaactgacttaaccttcgatcaaaccacctccccaggtggttttttcgtttacagggcaaaagattacgcgcagaaaaaaaggatctcaagaagatcctttgatcttttctactgaaccgctctagatttcagtgcaatttatctcttcaaatgtagcacctgaagtcagccccatacgatataagttgtaattctcatgttagtcatgccccgcgcccaccggaaggagctgactgggttgaaggctctcaagggcatcggtcgagatcccggtgcctaatgagtgagctaacttacattaattgcgttgcgctcactgcccgctttccagtcgggaaacctgtcgtgccagctgcattaatgaatcggccaacgcgcggggagaggcggtttgcgtattgggcgccagggtggtttttcttttcaccagtgagacgggcaacagctgattgcccttcaccgcctggccctgagagagttgcagcaagcggtccacgctggtttgccccagcaggcgaaaatcctgtttgatggtggttaacggcgggatataacatgagctgtcttcggtatcgtcgtatcccactaccgagatgtccgcaccaacgcgcagcccggactcggtaatggcgcgcattgcgcccagcgccatctgatcgttggcaaccagcatcgcagtgggaacgatgccctcattcagcatttgcatggtttgttgaaaaccggacatggcactccagtcgccttcccgttccgctatcggctgaatttgattgcgagtgagatatttatgccagccagccagacgcagacgcgccgagacagaacttaatgggcccgctaacagcgcgatttgctggtgacccaatgcgaccagatgctccacgcccagtcgcgtaccgtcttcatgggagaaaataatactgttgatgggtgtctggtcagagacatcaagaaataacgccggaacattagtgcaggcagcttccacagcaatggcatcctggtcatccagcggatagttaatgatcagcccactgacgcgttgcgcgagaagattgtgcaccgccgctttacaggcttcgacgccgcttcgttctaccatcgacaccaccacgctggcacccagttgatcggcgcgagatttaatcgccgcgacaatttgcgacggcgcgtgcagggccagactggaggtggcaacgccaatcagcaacgactgtttgcccgccagttgttgtgccacgcggttgggaatgtaattcagctccgccatcgccgcttccactttttcccgcgttttcgcagaaacgtggctggcctggttcaccacgcgggaaacggtctgataagagacaccggcatactctgcgacatcgtataacgttactggtttcacattcaccaccctgaattgactctcttccgggcgctatcatgccataccgcgaaaggttttgcgccattcgatggtgtc

SEQ ID NO: 104 - DNA, 4606 bp, Artificial Sequence
  Synthetic vector
cgggatctcgacgctctcccttatgcgactcctgcgtttagggaaagagcatttgtcagaatatttaagggcgcctgtcactttgcttgatatatgagaattatttaaccttataaatgagaaaaaagcaacgcactttaaataagatacgttgctttttcgattgatgaacacctataattaaactattcatctattatttatgattttttgtatatacaatatttctagtttgttaaagagaattaagaaaataaatctcgaaaataataaagggaaaatcagtttttgatatcaaaattatacatgtcaacgataatacaaaatataatacaaactataagatgttatcagtatttattatgcatttagaataccttttgtgtcgcccttattcgactccctatagaagttcctattctctagaaagtataggaacttcccttcattttggatccaattgtgagcggataacaattacgagcttcatgcacagtgatcgacgctgttgacaattaatcatcggctcgtataatgtgtggatgtggaattgtgagcgctcacaattccacaacggtttccctctagaaataattttgtttaacaggaggtaaaacatatggcggacacgttattgattctgggtgattgtctgagcgccgggtatcgaatgtctgccagcgcggcctggcctgccttgttgaatgataagtggcagagtaaaacgtcggtagttaatgccagcatcagcggcgacacctcgcaacaaggactggcgcgccttccggctctgctgaaacagcatcagccgcgttgggtgctggttgaactgggcggcaatgacggtttgcgtggttttcagccacagcaaaccgagcaaacgctgcgccagattttgcaggatgtcaaagccgccaacgctgaaccattgttaatgcaaatacgtctgcctgcaaactatggtcgccgttataatgaagcctttagcgccatttaccccaaactcgccaaagagtttgatgttccgctgctgcccttttttatggaagaggtctacctcaagccacaatggatgcaggatgacggtattcatcccaaccgcgacgcccagccgtttattgccgactggatggcgaagcagttgcagcctttagtaaatcatgactcataagcgttaagtcagtcgtcagacgccggttaatccggcgttttttttgacgcccactaaagagaaaacaatctcgagtctggtaaagaaaccgctgctgcgaaatttgaacgccagcacatggactcgtctactagcgcagcttaattaacctaggctgctgccaccgctgagcaataactagcataaccccttggggcctctaaacgggtcttgaggggttttttgctgaaacctcaggcatttgagaagcacacggtcacactgcttccggtagtcaataaaccggtaaaccagcaatagacataagcggctatttaacgaccctgccctgaaccgacgaccgggtcatcgtggccggatcttgcggcccctcggcttgaacgaattgttagacattatttgccgactaccttggtgatctcgcctttcacgtagtggacaaattcttccaactgatctgcgcgcgaggccaagcgatcttcttcttgtccaagataagcctgtctagcttcaagtatgacgggctgatactgggccggcaggcgctccattgcccagtcggcagcgacatccttcggcgcgattttgccggttactgcgctgtaccaaatgcgggacaacgtaagcactacatttcgctcatcgccagcccagtcgggcggcgagttccatagcgttaaggtttcatttagcgcctcaaatagatcctgttcaggaaccggatcaaagagttcctccgccgctggacctaccaaggcaacgctatgttctcttgcttttgtcagcaagatagccagatcaatgtcgatcgtggctggctcgaagatacctgcaagaatgtcattgcgctgccattctccaaattgcagttcgcgcttagctggataacgccacggaatgatgtcgtcgtgcacaacaatggtgacttctacagcgcggagaatctcgctctctccaggggaagccgaagtttccaaaaggtcgttgatcaaagctcgccgcgttgtttcatcaagccttacggtcaccgtaaccagcaaatcaatatcactgtgtggcttcaggccgccatccactgcggagccgtacaaatgtacggccagcaacgtcggttcgagatggcgctcgatgacgccaactacctctgatagttgagtcgatacttcggcgatcaccgcttccctcatactcttcctttttcaatattattgaagcatttatcagggttattgtctcatgagcggatacatatttgaatgtatttagaaaaataaacaaatagctagctcactcggtcgctacgctccgggcgtgagactgcggcgggcgctgcggacacatacaaagttacccacagattccgtggataagcaggggactaacatgtgaggcaaaacagcagggccgcgccggtggcgtttttccataggctccgccctcctgccagagttcacataaacagacgcttttccggtgcatctgtgggagccgtgaggctcaaccatgaatctgacagtacgggcgaaacccgacaggacttaaagatccccaccgtttccggcgggtcgctccctcttgcgctctcctgttccgaccctgccgtttaccggatacctgttccgcctttctcccttacgggaagtgtggcgctttctcatagctcacacactggtatctcggctcggtgtaggtcgttcgctccaagctgggctgtaagcaagaactccccgttcagcccgactgctgcgccttatccggtaactgttcacttgagtccaacccggaaaagcacggtaaaacgccactggcagcagccattggtaactgggagttcgcagaggatttgtttagctaaacacgcggttgctcttgaagtgtgcgccaaagtccggctacactggaaggacagatttggttgctgtgctctgcgaaagccagttaccacggttaagcagttccccaactgacttaaccttcgatcaaaccacctccccaggtggttttttcgtttacagggcaaaagattacgcgcagaaaaaaaggatctcaagaagatcctttgatcttttctactgaaccgctctagatttcagtgcaatttatctcttcaaatgtagcacctgaagtcagccccatacgatataagttgtaattctcatgttagtcatgccccgcgcccaccggaaggagctgactgggttgaaggctctcaagggcatcggtcgagatcccggtgcctaatgagtgagctaacttacattaattgcgttgcgctcactgcccgctttccagtcgggaaacctgtcgtgccagctgcattaatgaatcggccaacgcgcggggagaggcggtttgcgtattgggcgccagggtggtttttcttttcaccagtgagacgggcaacagctgattgcccttcaccgcctggccctgagagagttgcagcaagcggtccacgctggtttgccccagcaggcgaaaatcctgtttgatggtggttaacggcgggatataacatgagctgtcttcggtatcgtcgtatcccactaccgagatgtccgcaccaacgcgcagcccggactcggtaatggcgcgcattgcgcccagcgccatctgatcgttggcaaccagcatcgcagtgggaacgatgccctcattcagcatttgcatggtttgttgaaaaccggacatggcactccagtcgccttcccgttccgctatcggctgaatttgattgcgagtgagatatttatgccagccagccagacgcagacgcgccgagacagaacttaatgggcccgctaacagcgcgatttgctggtgacccaatgcgaccagatgctccacgcccagtcgcgtaccgtcttcatgggagaaaataatactgttgatgggtgtctggtcagagacatcaagaaataacgccggaacattagtgcaggcagcttccacagcaatggcatcctggtcatccagcggatagttaatgatcagcccactgacgcgttgcgcgagaagattgtgcaccgccgctttacaggcttcgacgccgcttcgttctaccatcgacaccaccacgctggcacccagttgatcggcgcgagatttaatcgccgcgacaatttgcgacggcgcgtgcagggccagactggaggtggcaacgccaatcagcaacgactgtttgcccgccagttgttgtgccacgcggttgggaatgtaattcagctccgccatcgccgcttccactttttcccgcgttttcgcagaaacgtggctggcctggttcaccacgcgggaaacggtctgataagagacaccggcatactctgcgacatcgtataacgttactggtttcacattcaccaccctgaattgactctcttccgggcgctatcatgccataccgcgaaaggttttgcgccattcgatggtgtc

SEQ ID NO: 105 - DNA, 3654 bp, Acinetobacter sp. ADP1
caagcatatggaattttagaaaacatatgacgcaccaagactgagaatgaaaggatcaacctcaattttagtagaaacaggaaccgggccaagagtacctgtgacgtccgttttgaaaggaatataacgcacatctgaatttagcatccatgagttaccaaggtcatatctaaggccaacctgaaaagcaggcgcccatttatccttaatatcaaacgaactcaaagcaccgtcggttttatcaaaaaatagcacccgaccaacaccaaccccaacatatggataaagtcgctcaaagctatcgtaatgatattgaagcgaaagaattgcagggccgtaatcaacttcactgactcttcccagcgaggagattgatttctcaccttgaaatttagccctagctggcaccccaacaaaaaaatccaccgctatatttgagctaacaaaataggcgatatcaaacgtaagtgttgtatcattaccaatacttacatcagcatttggcaaagccccccctccaacatttagatcgccaagctcctcacccacatagaccttagaaaaattgaagctagcgacccagtcaccctgattatagccagcagatttcgccggataattttcattcgcccatgcagtggccgcccccaaaacaaaattagcaaccaacaccggcatcgcgattactttataattagaaaaactcattgtgctaccctcgttttgttgtcgttacaggtcgttaaagctgtgcgggaatcaagtctggaaccagtttggtgagtgtcaggcgctgtttacccgccgtagcacctaatagtacaaaacctctgagtgtatcggtattgtcgatagctttggcaagcataccatcttcaaattcttctgtttcccagtttacatctacatccacaggtacaggaagtacggtgagcggggctgcaggcgtttttacagcaactggcatggcaggatagtgaacatgtgttgtttcaccactcaaggttttcgcgagggcgcgggcctgctgcatgatcggcatcacgtaggggagcaaggttccattaacttcagcacagtcgcctattgcatagatgtcttcaaggttggtttctaggaggctattagtcaaaatacctcgactggtatgcacgcctgcgtgttttgccagatcaatgtttggttgtaatccgattgcagataaaacaatgtcggccactagcgtctgaccatttgccagtgtgacagcataatcttgaccatcgttaattttagatactttttctactgtggttgaaagtacaaagtgaataccgctttcttccagatttttctgaaaagcatctgcaatatgcgcaggtaatagacgacccagtgggcgaggagacaagtcgatgactgtcacctgatgcccagtatgctgtaaatcattggcaaattcacaaccaataagacctgcacctagaatgacaacacgcttatcttgacgttttgcaagattttcacgaaaggcgcgataatcgataagagagttcaccacatgaatatcatcactaccatcaccggcaatggctaaacgggttggattggcgcctacagccagaaccagtttggaatagggctgaatcgtttcctgaccatttttttctaattttaattcatgagtttctggattaatggcttttacccaagtttctgacaaaatttgcagcttgagctgggtactcattttttctgcatcacctaatggaatctgttctggtgctttgttgccagaaagcgcattagataaggttggttttgcataattcactgcatcgtcagcacaaatcatgacaagttcatgttcaggattaagcttgcgaaattcacgagcaagggtataacctgccattcctgatccgataatgacgattgggtgcattattattctccgtagtaaggtaataaaaactaagattaaattaaaaagaccatgtttcatggacatggtcttttgaaataccgattaaacttcgatcatttcaaaatcaacttttgaaacgccgcagtcagggcaagtccagtcatcaggaatatcttcccattttgtccctggtgcaatgccgtcttgtggccagccttcggcttcatcataaatccaaccacaaacgatacattgatactttttcatttgattctccaacctgataagttcgcttcagctgcctttcagtaaaacaattccatataattacttgccgttttctatattcgggtcagtcaaaccaaacttggccaatatcttggcacgacgttttggatagatattggctttggtcaaatcctctttataatgctcaaatactcgtttatccatcattttaaaccaaagtggcggaatcatagcaggcaacaacatactggcataaccacttggtaactcaggtgcttcatcaaaatgacgcaatgcctgaaatggacgcgtcggataagcgtgatgatctgaatgtcgttgtaactggtataaaaacagattcgtcacgatattgttattattccagctatgctctggcatggtacgttcgtaattgccatccgctcttttctggcgttttagaccataatgctcgatataattaatgatctcaaataaactaatcccgtaaaaagcttgcgtaaccagataaggaatcgttcctttaccaaatatcgcaattatcgaactatgaaaagcagcactcatcccccagccctgtaatagttcattatcttttgaccaaaactttttgcctttacgtttcagacgatgtgtctcaatttcgattgcagattttaatgaaccaaagaccgttcttggccaaaactcataaaatgtttcacccatttgcgacgaagctggatcttcaggagtcgctgcacgcttgtgatgtccgtaaggatgttctatacgaaagtgattgtatcctgtaggaacgagcgccaaatgagacaggatatgatcgagtcgatctgctttatggctcaattcatgcgcggtattcactgcaataccattgattgcacccatcgaaatgcctaaaagaattttatcaataaaagatgtctttttacggctcaccaaataacaggcataaacattggcaatatactgtaatggaatgaagcttttcaccaaacgtgcgtaataaggatcattttcaagctgcttgatttcttcagacgttggattgctggcatcttttccaataatcgtatcaatcaccggaataataatgtgtagaacaatagggccacctagcgcaaatatttttttgattggacggggtgaaaactgataacctgccaaaatcccgatcccaatgactggtaatgcaggactaatcatccataagtaacgtttacgatcaatttcacgcattgatcttgcagcattgatcacttcttcaaagttttgatcgacatgtacaggtgcattcatagtgaatcctttcttgttatcctctattcatactgctcataatcatccatcttatatattaaaaacagttgtgatcgtccaaaaaacctatgtcaaagtctttggcattttcaaccatgtcaatgtcctaaaatcacatgtataagctacaatctcattctatactcttgctcaaataagaatttttaacgcgc

SEQ ID NO: 106 - DNA, 6622 bp, Marinobacter aquaeoli VT8
ttaaaagcgatatgcgacaccgatgctcacgatagtggggtccacttccacttctgcctgaacaggggccgggcctaggttaccggtgatatccgctttgaagggtgcatatctaacgtcaaaatttgccgaccagttattgtgtatcctccagcgaaaaccagcctgaatcgcaggggcccatgtatcttcgacgtcgaagtcggttagtgcgcgatccttctcatctaaaaagagaatccgtcctacacccgctccaaagtacggagagaagttgctacccgttaagacatgatactgaagcgaaagaattaccggaccataatctgtttgaccaagaaaaagaccggagagagactcttcgccctggaggtccgcactagcgggaatgccgccaaaaatgttaaatgccagctgattactcagaaaatacgacacgtcgaatgaaacggtcgtatcgttgttaatagacaggttggaatttggaacgggggcaccccccgcagaggctgatcgcaaatcttcatcggttaaaactctagtggcattcagtccaaccacccagtcgcctctactgtaaaccggctcagattgagcgttggccaggctcgcagcaagtgaaagtaaaaggaacgccactaacgagactttactaattattttaggtttcatttttttattatcctttttggtctagtcttcatagaggacatagtcctcttttgtggcaccacagtccggacagcaccaatcgtctggaatatcttcaaaacgagtgccggcagggaagccttcggcttcatctccgagagcttcatcgtagatatggccgcaagtgatgcagacccacttccgataggtatctttttgagtcgagtctttcggcgattttgaagagttaggcttgggtttcgctttgggctttgttttatttttagctgaaggagtagatgcgcccgttgctttctgcgatgctccctcggtcttagcttggctggcagggcggaccgctgtattggttgcggacaccgaaagttccgggttcgcttcttgaagcgcaacgaagtcaaccttatccctgacggcacagtctggacaggaccagtcttcaggaattttttcccatgtcgttcctgcaggaaagccttcgtgcggatcaccaaccacttcgtcgtatacataaccacaatcagggcattgatatttagccatttagagcacctttcaaacgatattattgtctttgttttggtagcgcccgacgcgcaccctctttcaggtgcacgtcagaggctctttttctgcaacgtaaataaagtaaacgaggtatataagttccgattagccgatcatttagccgcggcggtatcgactgattcagaatcagtcccaccaaatttacgctcatagaattcacgcttgccgggttgaatctgaatcttatcgagatctcctttagcccaatccagcacccggtggtccattatcgaacgaaaccatgagggaaacattgcggccaggaacatcccgggatatcccgatggtaaggaaggcaggtctttgaagtcgcgaagcgattgataggaccttgtaggatgggcgtgatggtcggaatgtcgttgcaaatgaaacagaatcaggttcgacataatatggtttgagttccatgagtggtgcggttgttgacgctcataacgtccatccgacatcttctcgcgcagcaatccgtaatgctcaatgtagttggcgctggtcagctgccaccagccaaaggccatttgaatgggcaaaaagatcagcattaagggaccaaaaaacgccagcaatcccgcataaagcacagcggtcaaaatcataggctgaagaacttcgttctccaggctccagacactttttccacaacgactgaggcgctgttcctctaaatcccatgcccgcttgaaagcaccgggaatttcacgcagtgagaatgagtaaatggactcacccatgcgggatgtcgccgggtccatcggcgtagccacatcacggtgatgccccttattgtgctcaatgaagaaatgaccatatccgaccacggcgaggacaagcttcgccatccaacggtcaaacgtttcttttttatggccaagttcgtggcctgtgttcagggccagaccattcacgattcccagggaaagggctaatgccagaaactcgaaaacattcattggttgcgtggatacccaccaggcactgacaaccaaggcggcatagtgaataggaaccgtcaagtaggtcagtacccggtagtaacgatcctgttcaagccgaggcacggccgactcgggggggttggaaaaatcctctccaaacatggcatcaatcaagggaactgcgccataccaaaggatcaacaccaatccgtaccaaatgctccatccagtttgggataccaaataaaggccaataagaggcgtcgctggccacagcacagaaaggacccacaggtggcgttttctgtccacataaccttcggcatcagggtctctctgaagagactctgttgttaagacattttctgacattgacattaggatcaccttattgtttttcagcttgatcatttttctacattgtgcgaacaccgagtccctcaggtgaacggacaagttgtaggcatgaacaggtttggccagaaccggagatcaaacaactactctaaggggtagttttcgcactagacatctatcaatatgctttcaccccatagcgccctcgcgtttcggggagacgaagcaggagatcggattgtcatgacccgccatagcttggaagactggtgtcggaggatgtctgaaaagatgtgggctcgtcagtatttcattactcaagggtgtttagaccgctattgcctgagcgcttctgctacgcctgaatcaaaggtagttctgtatcgggccccgccaggctatggaaaatctgtacaagtggccttggcagcaaacactcgcgaactggaacgtgagagcgccgtttatatcaatacccggtcgtgccctgactcatgtgacgttaatggcagtttgtttgcagcgttagttttatatcaactcgaaggagttgaatcctggcgcacgataaaaagtgacatcgacaccatcgaagttcttcgaaacgcactgtgtaatgcaaaaaagacgataagaatttgccttgatggggttggcgaggctaaacataccgcggatttgattgaggatttaatctgtgaaacaccgagcaatgtgaaatttttcattgcaccgagtcgcgtcggggcgttgccacgtttgtctatgatggcgggtgttgtaacgtatggtgctgatgaacttgtatttacagaagaggaggttagtgaattatcgggtatgggtggccccgaagccagcaacatcataaaagcgatcggtggatggccagcacttgtcaggcttatgtgccgaaccccaaacccaaatctccccgcagcgacttggccggaaactcgctcgtatttcagggacaacctcttaactgcgttacccaatagtacgaggacctttctttgcaatgcagcgatgctcgaagtaatcagcgctgaatgctatggctatgtctataagacagaagaggccgaccgggaaattacgtttcttaacgaacattatgctcttttagctcccaccgggacttctgctgatcgtatggatatgcaccctgtgctgcgagagtatttgcgtagtttatttaacaccacccaacgagaacgtcgctcgtatgtactgaaacgggtcgcgttctggcattggcgtaggggagagtacctccattcaatcaatgcagctctggaagccagtgaccatcgatgggctcgcggcgtaagtgacagcattatcctggacgtggcactcagacagggtgaaatcgaagtacttcgcacctggtttggaaaagtaccggctcgcacgataaaaaaaattgccgccttgagcataggttacgcgtggattttgtatttcagccaacaagctcgtcaagcagacgaaatactggctagttcgcttcatccgagctccaggggggcgggcaatcttgatgaggaaggatggcgggaattggttaatgcgataggcaaagctacacaggatgaattactggagagtcaggttctctgtcaaaaatggatagacgcctttggcgaccgtaacatggttggcaaaggcgcagcacttacgtgccaggcattcattgcctccagtggacgccattttgaagagttggagcgattgtcccatcgagcggctgtggccatccagtcatccaatcaacattacgcttttatttggcttaaaactgcagaaattcagggtgaactgttcaagggggacatcgcccgagcaaggagtgtgctgcttcaagcgaataaaacagcagaaaagattcaggtgccaaaaacttttttaaataaaatgtttggcacccttgagttacaaatcctacacgaacagaaccatcacctggttacccaggaatccgcacaggcttcgttggatttcgctttgaattatggcgttacagatattctgtgggggtgtacacaggcctacagccgttttctgtaccaccaagggttccaagatagagccatggccttgttggaacaatcccgcttagccgcctgcgagcgagagctgtctcgtctaaatatcctgactaaagttcagttagctgagtttactctcctgaacaacgaggaattgggtccacctatactccccgatgaatgtgagctgacgttcctgccaaatcaaaaccaggccattcaagcccgtatggccctggtaaactcaatgtatagactacggcttgggaaacagtttggtgtcgccgaaaaatatgccaaacaagcactacaaagcgccagcgcaatttcagacgctagaaccaagatcgcggcccactattgtcaggccctggcagcgtttgccctcggttcatcaaaatcggcgaagcgcacgattcttgatgcaaacctactttcggaacatttgaactgtcacttcacacggctctggatcaaagaagcgctactttctcttagcccccttgctcaggatctttttaacgatctgccagacgactctgaagctaaagctacgaaggatcccgatgtcagaatagaagactccagcgtgccacctgtgcccggcaatgcccactcaaccatcacgataaagcagatttctctgttgaaatgcgtaagcaacggaatgaccaacagagaaatcgctgaacggcttcttgtgacggaggataccgtcaaatggcatatgaagaagattttcagcgaacttaaagtaaccaaccgggttcaggcagtcactgaagctcgactgcgcggacttttatagtgctacaaaaacaaaagaggaatcgagcgaatatgcaaaaaatagttatcattggcgctggaatagccagcctgaccgccgcagaggctctccgccagaatggattcgacggaacgattaccattttgggcgaggaaaacacgctgccttaccagcgtcccccgttgtccaaagcctatttgacctcagatgagttgccctcgccaactccgatccgttctcctaatttctttcgggacaacaaagttgaatttgaacaaggcggtaaagtaatagcgcttgaacgatcggcaaagcaagtagtgattcaaggcggcaggaaaattaaatacgacacgctgattttggcaacaggagcgaggccacgtcctattgatttacctggtgagagcgcaaaaaatgttttctatctcaggaatcttgaccactccaccgcattacgtaatgccctgttagccccggaatgcgagaaggtggccattctcggcgcgggtgttatcgggcttgaagtcgcctccgctgccaatctacagggaaaacaagtctctgtgtttgaggccaacagccgagcgatgtgtcgagtagcgtcaccattaacaagtaattttgtcagaaaccgcatggcctccgccggcgtaatgttctacttcaatgctagcgtcaaccaaattctcactgagggagaccgagtttccggtatccgtttgtccgacggcactaccaaacccgcagacgtcgttgttatcggtataggagccatccccaatgctgaacttgcgcaagacgcaaacctggattgcgacggtggtattatagtagacagcggcatgcgtagctccgaccctgacatatttgcgatcggagattgcgctaaagccgtcaacgtttccaccaatacacccatccgaatagaaactattcacaatgccatgcttcaagcacaaattgcggcggctcatatttgtggcaaaccgtctccgcctgcctctcctccccgtttttggtcagatctcaacggcatgaaagtccagtgtattggaatcgccactggatacgaccgaattcagcggcgtcccacagagagtgacaatgcctgtgaattctggctcttttccggagaccggatgatcgcaactgaaacagtcaatcttcccacccggcaagccaagctatctaaagctctctccgggtaatcgagctcatagtcc

SEQ ID NO: 107 - DNA, 11326 bp, Artificial Sequence
  Synthetic vector
caagcatatggaattttagaaaacatatgacgcaccaagactgagaatgaaaggatcaacctcaattttagtagaaacaggaaccgggccaagagtacctgtgacgtccgttttgaaaggaatataacgcacatctgaatttagcatccatgagttaccaaggtcatatctaaggccaacctgaaaagcaggcgcccatttatccttaatatcaaacgaactcaaagcaccgtcggttttatcaaaaaatagcacccgaccaacaccaaccccaacatatggataaagtcgctcaaagctatcgtaatgatattgaagcgaaagaattgcagggccgtaatcaacttcactgactcttcccagcgaggagattgatttctcaccttgaaatttagccctagctggcaccccaacaaaaaaatccaccgctatatttgagctaacaaaataggcgatatcaaacgtaagtgttgtatcattaccaatacttacatcagcatttggcaaagccccccctccaacatttagatcgccaagctcctcacccacatagaccttagaaaaattgaagctagcgacccagtcaccctgattatagccagcagatttcgccggataattttcattcgcccatgcagtggccgcccccaaaacaaaattagcaaccaacaccggcatcgcgattactttataattagaaaaactcattgtgctaccctcgttttgttgtcgttacaggtcgttaaagctgtgcgggaatcaagtctggaaccagtttggtgagtgtcaggcgctgtttacccgccgtagcacctaatagtacaaaacctctgagtgtatcggtattgtcgatagctttggcaagcataccatcttcaaattcttctgtttcccagtttacatctacatccacaggtacaggaagtacggtgagcggggctgcaggcgtttttacagcaactggcatggcaggatagtgaacatgtgttgtttcaccactcaaggttttcgcgagggcgcgggcctgctgcatgatcggcatcacgtaggggagcaaggttccattaacttcagcacagtcgcctattgcatagatgtcttcaaggttggtttctaggaggctattagtcaaaatacctcgactggtatgcacgcctgcgtgttttgccagatcaatgtttggttgtaatccgattgcagataaaacaatgtcggccactagcgtctgaccatttgccagtgtgacagcataatcttgaccatcgttaattttagatactttttctactgtggttgaaagtacaaagtgaataccgctttcttccagatttttctgaaaagcatctgcaatatgcgcaggtaatagacgacccagtgggcgaggagacaagtcgatgactgtcacctgatgcccagtatgctgtaaatcattggcaaattcacaaccaataagacctgcacctagaatgacaacacgcttatcttgacgttttgcaagattttcacgaaaggcgcgataatcgataagagagttcaccacatgaatatcatcactaccatcaccggcaatggctaaacgggttggattggcgcctacagccagaaccagtttggaatagggctgaatcgtttcctgaccatttttttctaattttaattcatgagtttctggattaatggcttttacccaagtttctgacaaaatttgcagcttgagctgggtactcattttttctgcatcacctaatggaatctgttctggtgctttgttgccagaaagcgcattagataaggttggttttgcataattcactgcatcgtcagcacaaatcatgacaagttcatgttcaggattaagcttgcgaaattcacgagcaagggtataacctgccattcctgatccgataatgacgattgggtgcattattattctccgtagtaaggtaataaaaactaagattaaattaaaaagaccatgtttcatggacatggtcttttgaaataccgattaaacttcgatcatttcaaaatcaacttttgaaacgccgcagtcagggcaagtccagtcatcaggaatatcttcccattttgtccctggtgcaatgccgtcttgtggccagccttcggcttcatcataaatccaaccacaaacgatacattgatactttttcatttgattctccaacctgataagttcgcttcagctgcctttcagtaaaacaattccatataattacttgccgttttctatattcgggtcagtcaaaccaaacttggccaatatcttggcacgacgttttggatagatattggctttggtcaaatcctctttataatgctcaaatactcgtttatccatcattttaaaccaaagtggcggaatcatagcaggcaacaacatactggcataaccacttggtaactcaggtgcttcatcaaaatgacgcaatgcctgaaatggacgcgtcggataagcgtgatgatctgaatgtcgttgtaactggtataaaaacagattcgtcacgatattgttattattccagctatgctctggcatggtacgttcgtaattgccatccgctcttttctggcgttttagaccataatgctcgatataattaatgatctcaaataaactaatcccgtaaaaagcttgcgtaaccagataaggaatcgttcctttaccaaatatcgcaattatcgaactatgaaaagcagcactcatcccccagccctgtaatagttcattatcttttgaccaaaactttttgcctttacgtttcagacgatgtgtctcaatttcgattgcagattttaatgaaccaaagaccgttcttggccaaaactcataaaatgtttcacccatttgcgacgaagctggatcttcaggagtcgctgcacgcttgtgatgtccgtaaggatgttctatacgaaagtgattgtatcctgtaggaacgagcgccaaatgagacaggatatgatcgagtcgatctgctttatggctcaattcatgcgcggtattcactgcaataccattgattgcacccatcgaaatgcctaaaagaattttatcaataaaagatgtctttttacggctcaccaaataacaggcataaacattggcaatatactgtaatggaatgaagcttttcaccaaacgtgcgtaataaggatcattttcaagctgcttgatttcttcagacgttggattgctggcatcttttccaataatcgtatcaatcaccggaataataatgtgtagaacaatagggccacctagcgcaaatatttttttgattggacggggtgaaaactgataacctgccaaaatcccgatcccaatgactggtaatgcaggactaatcatccataagtaacgtttacgatcaatttcacgcattgatcttgcagcattgatcacttcttcaaagttttgatcgacatgtacaggtgcattcatagtgaatcctttcttgttatcctctattcatactgctcataatcatccatcttatatattaaaaacagttgtgatcgtccaaaaaacctatgtcaaagtctttggcattttcaaccatgtcaatgtcctaaaatcacatgtataagctacaatctcattctatactcttgctcaaataagaatttttaacgcgctatggaaattctccaatttttattaaattagtcgctacgagatttaagacgtaattttatgcctaactgagaaagttaagccgcccactctcactctcgacatcttaaacctgagctaatcggacgcttgcgccaactacacctacgggtagtttttgctccgtcgtctgctggaaaaacacgagctggccgcaagcatgccaggtaccgcgagctactcgcgacggctgaaagcaccgaaatgagcgagctatctggtcgattttgacccggtgcccgtcttcaaaatcggcgaaggccgaagtcggccagaaatagcggcctacttcagaccttccctagtaaatattttgcaccaccgatcatgccgactacacttaagtgtagttttaatatttaacaccgtaacctatggtgaaaatttccagtcagctggcgcgagaatagcataatgaaaataataataaataatgatttcccggtcgctaaggtcggagcggatcaaattacgactctagtaagtgccaaagttcatagttgcatatatcggccaagattgagtatcgcggatggagccgctcccagagtatgcctttacagagccccacctggatatgggaaaaccgttgctcttgcgttcgagtggctacgccacagaacagccggacgtcctgcagtgtggctttctttaagagccagttcttacagtgaatttgatatctgcgcagagattattgagcagcttgaaactttcgaaatggtaaaattcagccgtgtgagagagggtgtgagcaagcctgcgctcttgcgagaccttgcatctagtctttggcagagcacctcgaataacgagatagaaacgctagtttgtttggataatattaatcatgacttagacttgccgttgttgcacgcacttatggagtttatgttaaatacaccaaaaaatatcaggtttgcagttgcaggcaatacaataaaagggttctcgcagcttaaacttgcaggcgctatgcgggagtacaccgagaaagacttggcctttagcgcagaagaggcggtggcgttagcggaggcagagtctgttcttggagttcctgaagaacagatagagaccttggtgcaagaagttgaggggtggcctgctcttgtagtttttttgttaaagcgtgagttgccggccaagcatatttcagcagtagttgaagtagacaattactttagggatgaaatatttgaggcgattcccgagcgctatcgtgtttttcttgcaaattcttcattgctcgatttcgtgacgcctgatcaatacaattatgtattcaaatgcgtcaatggggtctcatgtattaagtatttaagcactaattacatgttgcttcgccatgtgagcggtgagccagcgcagtttacactgcatccagtactgcgtaattttctacgagaaattacttggactgaaaatcctgctaaaagatcctacctgcttaagcgtgcagctttctggcattggcgtagaggtgaataccagtatgcaatacgaatatccctacgggcgaatgactgtcgctgggcagtcagcatgtctgagagaataattttagatttgtcatttcgtcagggcgaaatagatgcgctgagacagtggctgttagagctgccgaagcaggcctggcaccaaaaacccatagtgcttattagttacgcgtgggtattgtatttcagtcagcaaggcgcgcgagcagagaagttaattaaagacctatcttcacaatccgataaaaaaaataaatggcaagaaaaggaatggctgcagcttgtgcttgcaataggtaaagcaaccaaagatgaaatgctttcgagtgaggagctctgtaataagtggattagtttatttggggattcaaacgcagttggaaaaggggccgcgctaacctgtttggcttttatttttgccagtgagtatagatttgcagagttggagaaggtgctggctcaggcccaagccgtgaataaatttgcaaaacaaaattttgcttttggttggctgtatgtcgcgaggtttcaacaagccctagcaagcggaaaaatgggctgggcgaggcagattataactcaagcacgcacagacagtcgcgcgcagatgatggaatccgagtttacttcgaaaatgtttgacgctctagagcttgagttacattatgaattgcgctgcttggacacctcagaagaaaagctctccaaaattttagagttcatttccaatcacggggtgacagacgtgtttttttccgtatgccgtgctgtgtcagcttggcggcttggaaggagtgacctaaatggctccattgagatattggagtgggcgaaggcgcatgcggttgaaaaaaatctaccaagattggaagttatgagccaaattgagatctatcagcgcttagtctgtcaaggcataacgggcataaataatttaaaaactcttgaagatcataagattttctccggacagcactcagcccccctaaaagcacgcctgctgcttgttcaatcactagtgctttcccgagatcggaactttcatagtgccgcgcacagagcgttattggctattcagcaagcccgtaaaattaacgcgggccagctggaagtccgtggattattgtgtttggccggagcgcaggcaggtgccggtgatttaaaaaaggctcagcttaacattgtttatgcagtggagatagcaaaacagcttcaatgctttcaaacagttcttgatgaagtatgtttaattgagcgaataataccggcttcatgtgaagccttcacagcagttaatttagatcaagcgattggggcttttagtcttccgcgaatagttgagattggaaagtccgcagagaataaagctgacgctttattgacacggaagcagattgctgtcttgaggcttgtaaaagaggggtgctcaaacaaacaaatagcaacaaatatgcatgtcaccgaagatgctataaagtggcacatgaggaaaatatttgccaccttgaatgtagtgaatcgcacgcaagcaacaattgaagctgagcgtcaaggaattatctaaaataatcggcattaagtgatatagtgaaaagtatactcgagctcatagtccacgacgcccgtgattttgtagccctggccgacggccagcaggtaggccgacaggctcatgccggccgccgccgccttttcctcaatcgctcttcgttcgtctggaaggcagtacaccttgataggtgggctgcccttcctggttggcttggtttcatcagccatccgcttgccctcatctgttacgccggcggtagccggccagcctcgcagagcaggattcccgttgagcaccgccaggtgcgaataagggacagtgaagaaggaacacccgctcgcgggtgggcctacttcacctatcctgcccggctgacgccgttggatacaccaaggaaagtctacacgaaccctttggcaaaatcctgtatatcgtgcgaaaaaggatggatataccgaaaaaatcgctataatgaccccgaagcagggttatgcagcggaaaagcgctgcttccctgctgttttgtggaatatctaccgactggaaacaggcaaatgcaggaaattactgaactgaggggacaggcgagagaggatcaatggctatctgggggaccgagggctgtcgctgcgccaaggcacgattggagatcccctatgcggtgtgaaataccgcacagatgcgtaaggagaaaataccgcatcaggcgctcttccgcttcctcgctcactgactcgctgcgctcggtcgttcggctgcggcgagcggtatcagctcactcaaaggcggtaatacggttatccacagaatcaggggataacgcaggaaagaacatgtgagcaaaaggccagcaaaaggccaggaaccgtaaaaaggccgcgttgctggcgtttttccataggctccgcccccctgacgagcatcacaaaaatcgacgctcaagtcagaggtggcgaaacccgacaggactataaagataccaggcgtttccccctggaagctccctcgtgcgctctcctgttccgaccctgccgcttaccggatacctgtccgcctttctcccttcgggaagcgtggcgctttctcatagctcacgctgtaggtatctcagttcggtgtaggtcgttcgctccaagctgggctgtgtgcacgaaccccccgttcagcccgaccgctgcgccttatccggtaactatcgtcttgagtccaacccggtaagacacgacttatcgccactggcagcagccactggtaacaggattagcagagcgaggtatgtaggcggtgctacagagttcttgaagtggtggcctaactacggctacactagaaggacagtatttggtatctgcgctctgctgaagccagttaccttcggaaaaagagttggtagctcttgatccggcaaacaaaccaccgctggtagcggtggtttttttgtttgcaagcagcagattacgcgcagaaaaaaaggatctcaagaagatcctttgatcttttctacggggtctgacgctcagtggaacgaaaactcacgttaagggattttggtcatgagattatcaaaaaggatcttcacctagatccttttaaattaaaaatgaagttttaaatcaatctaaagtatatatgagtaaacttggtctgacagttaccaatcgattggtcggtcatttcgaaccccagagtcccgctcagaagaactcgtcaagaaggcgatagaaggcgatgcgctgcgaatcgggagcggcgataccgtaaagcacgaggaagcggtcagcccattcgccgccaagctcttcagcaatatcacgggtagccaacgctatgtcctgatagcggtccgccacacccagccggccacagtcgatgaatccagaaaagcggccattttccaccatgatattcggcaagcaggcatcgccatgggtcacgacgagatcctcgccgtcgggcatgcgcgccttgagcctggcgaacagttcggctggcgcgagcccctgatgctcttcgtccagatcatcctgatcgacaagaccggcttccatccgagtacgtgctcgctcgatgcgatgtttcgcttggtggtcgaatgggcaggtagccggatcaagcgtatgcagccgccgcattgcatcagccatgatggatactttctcggcaggagcaaggtgagatgacaggagatcctgccccggcacttcgcccaatagcagccagtcccttcccgcttcagtgacaacgtcgagcacagctgcgcaaggaacgcccgtcgtggccagccacgatagccgcgctgcctcgtcctgcagttcattcagggcaccggacaggtcggtcttgacaaaaagaaccgggcgcccctgcgctgacagccggaacacggcggcatcagagcagccgattgtctgttgtgcccagtcatagccgaatagcctctccacccaagcggccggagaacctgcgtgcaatccatcttgttcaatcatgcgaaacgatcctcatcctgtctcttgatcagatcttgatcccctgcgccatcagatccttggcggcaagaaagccatccagtttactttgcagggcttcccatcgattggatgcccgaggcatagactgtacaaaaaaacagtcataacaagccatgaaaaccgccactgcgccgttaccaccgctgcgttcggtcaaggttctggaccagttgcgtgagcgcatacgctacttgcattacagtttacgaaccgaacaggcttatgtcaattcgcctctcaggcgccgctggtgccgctggttggacgccaagggtgaatccgcctcgataccctgattactcgcttcctgcgccctctcaggcggcgataggggactggtaaaacggggattgcccagacgcctcccccgccccttcaggggcacaaatgcggccccaacggggccacgtagtggtgcgttttttgcgtttccacccttttcttccttttcccttttaaaccttttaggacgtctacaggccacgtaatccgtggcctgtagagtttaaaaagggacggatttgttgccattaagggacggatttgttgttaagaagggacggatttgttgttgtaaagggacggatttgttgtattgtgggacgcagatacagtgtccccttatacacaaggaatgtcgaacgtggcctcacccccaatggtttacaaaagcaatgccctggtcgaggccgcgtatcgcctcagtgttcaggaacagcggatcgttctggcctgtattagccaggtgaagaggagcgagcctgtcaccgatgaagtgatgtattcagtgacggcggaggacatagcgacgatggcgggtgtccctatcgaatcttcctacaaccagctcaaagaagcggccctgcgcctgaaacggcgggaagtccggttaacccaagagcccaatggcaaggggaaaagaccgagtgtgatgattaccggctgggtgcaaacaatcatctaccgggagggtgagggccgtgtagaactcaggttcaccaaagacatgctgccgtacctgacggaactcaccaaacagttcaccaaatacgccttggctgacgtggccaagatggacagcacccacgcgatcaggctttacgagctgctcatgcaatgggacagcatcggccagcgcgaaatagaaattgaccagctgcgaaagtggtttcaactggaaggccggtatccctcgatcaaggacttcaagttgcgagtgcttgatccagccgtgacgcagatcaacgagcacagcccgctacaggtggagtgggcgcagcgaaagaccgggcgcaaggtcacacatctgttgttcagttttggaccgaagaagcccgccaaggcggtgggtaaggccccagcgaagcgcaaggccgggaagatttcagatgctgagatcgcgaaacaggctcgccctggtgagacatgggaagcggcccgcgctcgactaacccagatgccgctggatctggcctagaggccgtggccaccacggcccggcctgcctttcaggctgcattattgaagcatttatcagggttattgtctcatgagcggatacatatttgaatgtatttagaaaaataaacaaaagagtttgtagaaacgcaaaaaggccatccgtcaggatggccttctgcttaatttgatgcctggcagtttatggcgggcgtcctgcccgccaccctccgggccgttgcttcgcaacgttcaaatccgctcccggcggatttgtcctactcaggagagcgttcaccgacaaacaacagataaaacgaaaggcccagtctttcgactgagcctttcgttttatttgatgcctggcagttccctactctcgcatggggagaccccacactaccatcggcgctacggcgtttcacttctgagttcggcatggggtcaggtgggaccaccgcgctactgccgccaggcaaattctgttttatcagaccgcttctgcgttctgatttaatctgtatcaggctgaaaatcttctctcatccgccaaaacagccaagcttggctgcaggtcgacggatcccgggcgcgc

SEQ ID NO: 108 - DNA, 11133 bp, Artificial Sequence
  Synthetic vector
acgacgcccgtgattttgtagccctggccgacggccagcaggtaggccgacaggctcatgccggccgccgccgccttttcctcaatcgctcttcgttcgtctggaaggcagtacaccttgataggtgggctgcccttcctggttggcttggtttcatcagccatccgcttgccctcatctgttacgccggcggtagccggccagcctcgcagagcaggattcccgttgagcaccgccaggtgcgaataagggacagtgaagaaggaacacccgctcgcgggtgggcctacttcacctatcctgcccggctgacgccgttggatacaccaaggaaagtctacacgaaccctttggcaaaatcctgtatatcgtgcgaaaaaggatggatataccgaaaaaatcgctataatgaccccgaagcagggttatgcagcggaaaagcgctgcttccctgctgttttgtggaatatctaccgactggaaacaggcaaatgcaggaaattactgaactgaggggacaggcgagagaggatcaatggctatctgggggaccgagggctgtcgctgcgccaaggcacgattggagatcccctatgcggtgtgaaataccgcacagatgcgtaaggagaaaataccgcatcaggcgctcttccgcttcctcgctcactgactcgctgcgctcggtcgttcggctgcggcgagcggtatcagctcactcaaaggcggtaatacggttatccacagaatcaggggataacgcaggaaagaacatgtgagcaaaaggccagcaaaaggccaggaaccgtaaaaaggccgcgttgctggcgtttttccataggctccgcccccctgacgagcatcacaaaaatcgacgctcaagtcagaggtggcgaaacccgacaggactataaagataccaggcgtttccccctggaagctccctcgtgcgctctcctgttccgaccctgccgcttaccggatacctgtccgcctttctcccttcgggaagcgtggcgctttctcatagctcacgctgtaggtatctcagttcggtgtaggtcgttcgctccaagctgggctgtgtgcacgaaccccccgttcagcccgaccgctgcgccttatccggtaactatcgtcttgagtccaacccggtaagacacgacttatcgccactggcagcagccactggtaacaggattagcagagcgaggtatgtaggcggtgctacagagttcttgaagtggtggcctaactacggctacactagaaggacagtatttggtatctgcgctctgctgaagccagttaccttcggaaaaagagttggtagctcttgatccggcaaacaaaccaccgctggtagcggtggtttttttgtttgcaagcagcagattacgcgcagaaaaaaaggatctcaagaagatcctttgatcttttctacggggtctgacgctcagtggaacgaaaactcacgttaagggattttggtcatgagattatcaaaaaggatcttcacctagatccttttaaattaaaaatgaagttttaaatcaatctaaagtatatatgagtaaacttggtctgacagttaccaatcgattggtcggtcatttcgaaccccagagtcccgctcagaagaactcgtcaagaaggcgatagaaggcgatgcgctgcgaatcgggagcggcgataccgtaaagcacgaggaagcggtcagcccattcgccgccaagctcttcagcaatatcacgggtagccaacgctatgtcctgatagcggtccgccacacccagccggccacagtcgatgaatccagaaaagcggccattttccaccatgatattcggcaagcaggcatcgccatgggtcacgacgagatcctcgccgtcgggcatgcgcgccttgagcctggcgaacagttcggctggcgcgagcccctgatgctcttcgtccagatcatcctgatcgacaagaccggcttccatccgagtacgtgctcgctcgatgcgatgtttcgcttggtggtcgaatgggcaggtagccggatcaagcgtatgcagccgccgcattgcatcagccatgatggatactttctcggcaggagcaaggtgagatgacaggagatcctgccccggcacttcgcccaatagcagccagtcccttcccgcttcagtgacaacgtcgagcacagctgcgcaaggaacgcccgtcgtggccagccacgatagccgcgctgcctcgtcctgcagttcattcagggcaccggacaggtcggtcttgacaaaaagaaccgggcgcccctgcgctgacagccggaacacggcggcatcagagcagccgattgtctgttgtgcccagtcatagccgaatagcctctccacccaagcggccggagaacctgcgtgcaatccatcttgttcaatcatgcgaaacgatcctcatcctgtctcttgatcagatcttgatcccctgcgccatcagatccttggcggcaagaaagccatccagtttactttgcagggcttcccatcgattggatgcccgaggcatagactgtacaaaaaaacagtcataacaagccatgaaaaccgccactgcgccgttaccaccgctgcgttcggtcaaggttctggaccagttgcgtgagcgcatacgctacttgcattacagtttacgaaccgaacaggcttatgtcaattcgcctctcaggcgccgctggtgccgctggttggacgccaagggtgaatccgcctcgataccctgattactcgcttcctgcgccctctcaggcggcgataggggactggtaaaacggggattgcccagacgcctcccccgccccttcaggggcacaaatgcggccccaacggggccacgtagtggtgcgttttttgcgtttccacccttttcttccttttcccttttaaaccttttaggacgtctacaggccacgtaatccgtggcctgtagagtttaaaaagggacggatttgttgccattaagggacggatttgttgttaagaagggacggatttgttgttgtaaagggacggatttgttgtattgtgggacgcagatacagtgtccccttatacacaaggaatgtcgaacgtggcctcacccccaatggtttacaaaagcaatgccctggtcgaggccgcgtatcgcctcagtgttcaggaacagcggatcgttctggcctgtattagccaggtgaagaggagcgagcctgtcaccgatgaagtgatgtattcagtgacggcggaggacatagcgacgatggcgggtgtccctatcgaatcttcctacaaccagctcaaagaagcggccctgcgcctgaaacggcgggaagtccggttaacccaagagcccaatggcaaggggaaaagaccgagtgtgatgattaccggctgggtgcaaacaatcatctaccgggagggtgagggccgtgtagaactcaggttcaccaaagacatgctgccgtacctgacggaactcaccaaacagttcaccaaatacgccttggctgacgtggccaagatggacagcacccacgcgatcaggctttacgagctgctcatgcaatgggacagcatcggccagcgcgaaatagaaattgaccagctgcgaaagtggtttcaactggaaggccggtatccctcgatcaaggacttcaagttgcgagtgcttgatccagccgtgacgcagatcaacgagcacagcccgctacaggtggagtgggcgcagcgaaagaccgggcgcaaggtcacacatctgttgttcagttttggaccgaagaagcccgccaaggcggtgggtaaggccccagcgaagcgcaaggccgggaagatttcagatgctgagatcgcgaaacaggctcgccctggtgagacatgggaagcggcccgcgctcgactaacccagatgccgctggatctggcctagaggccgtggccaccacggcccggcctgcctttcaggctgcattattgaagcatttatcagggttattgtctcatgagcggatacatatttgaatgtatttagaaaaataaacaaaagagtttgtagaaacgcaaaaaggccatccgtcaggatggccttctgcttaatttgatgcctggcagtttatggcgggcgtcctgcccgccaccctccgggccgttgcttcgcaacgttcaaatccgctcccggcggatttgtcctactcaggagagcgttcaccgacaaacaacagataaaacgaaaggcccagtctttcgactgagcctttcgttttatttgatgcctggcagttccctactctcgcatggggagaccccacactaccatcggcgctacggcgtttcacttctgagttcggcatggggtcaggtgggaccaccgcgctactgccgccaggcaaattctgttttatcagaccgcttctgcgttctgatttaatctgtatcaggctgaaaatcttctctcatccgccaaaacagccaagcttggctgcaggtcgacggatcttaaaagcgatatgcgacaccgatgctcacgatagtggggtccacttccacttctgcctgaacaggggccgggcctaggttaccggtgatatccgctttgaagggtgcatatctaacgtcaaaatttgccgaccagttattgtgtatcctccagcgaaaaccagcctgaatcgcaggggcccatgtatcttcgacgtcgaagtcggttagtgcgcgatccttctcatctaaaaagagaatccgtcctacacccgctccaaagtacggagagaagttgctacccgttaagacatgatactgaagcgaaagaattaccggaccataatctgtttgaccaagaaaaagaccggagagagactcttcgccctggaggtccgcactagcgggaatgccgccaaaaatgttaaatgccagctgattactcagaaaatacgacacgtcgaatgaaacggtcgtatcgttgttaatagacaggttggaatttggaacgggggcaccccccgcagaggctgatcgcaaatcttcatcggttaaaactctagtggcattcagtccaaccacccagtcgcctctactgtaaaccggctcagattgagcgttggccaggctcgcagcaagtgaaagtaaaaggaacgccactaacgagactttactaattattttaggtttcatttttttattatcctttttggtctagtcttcatagaggacatagtcctcttttgtggcaccacagtccggacagcaccaatcgtctggaatatcttcaaaacgagtgccggcagggaagccttcggcttcatctccgagagcttcatcgtagatatggccgcaagtgatgcagacccacttccgataggtatctttttgagtcgagtctttcggcgattttgaagagttaggcttgggtttcgctttgggctttgttttatttttagctgaaggagtagatgcgcccgttgctttctgcgatgctccctcggtcttagcttggctggcagggcggaccgctgtattggttgcggacaccgaaagttccgggttcgcttcttgaagcgcaacgaagtcaaccttatccctgacggcacagtctggacaggaccagtcttcaggaattttttcccatgtcgttcctgcaggaaagccttcgtgcggatcaccaaccacttcgtcgtatacataaccacaatcagggcattgatatttagccatttagagcacctttcaaacgatattattgtctttgttttggtagcgcccgacgcgcaccctctttcaggtgcacgtcagaggctctttttctgcaacgtaaataaagtaaacgaggtatataagttccgattagccgatcatttagccgcggcggtatcgactgattcagaatcagtcccaccaaatttacgctcatagaattcacgcttgccgggttgaatctgaatcttatcgagatctcctttagcccaatccagcacccggtggtccattatcgaacgaaaccatgagggaaacattgcggccaggaacatcccgggatatcccgatggtaaggaaggcaggtctttgaagtcgcgaagcgattgataggaccttgtaggatgggcgtgatggtcggaatgtcgttgcaaatgaaacagaatcaggttcgacataatatggtttgagttccatgagtggtgcggttgttgacgctcataacgtccatccgacatcttctcgcgcagcaatccgtaatgctcaatgtagttggcgctggtcagctgccaccagccaaaggccatttgaatgggcaaaaagatcagcattaagggaccaaaaaacgccagcaatcccgcataaagcacagcggtcaaaatcataggctgaagaacttcgttctccaggctccagacactttttccacaacgactgaggcgctgttcctctaaatcccatgcccgcttgaaagcaccgggaatttcacgcagtgagaatgagtaaatggactcacccatgcgggatgtcgccgggtccatcggcgtagccacatcacggtgatgccccttattgtgctcaatgaagaaatgaccatatccgaccacggcgaggacaagcttcgccatccaacggtcaaacgtttcttttttatggccaagttcgtggcctgtgttcagggccagaccattcacgattcccagggaaagggctaatgccagaaactcgaaaacattcattggttgcgtggatacccaccaggcactgacaaccaaggcggcatagtgaataggaaccgtcaagtaggtcagtacccggtagtaacgatcctgttcaagccgaggcacggccgactcgggggggttggaaaaatcctctccaaacatggcatcaatcaagggaactgcgccataccaaaggatcaacaccaatccgtaccaaatgctccatccagtttgggataccaaataaaggccaataagaggcgtcgctggccacagcacagaaaggacccacaggtggcgttttctgtccacataaccttcggcatcagggtctctctgaagagactctgttgttaagacattttctgacattgacattaggatcaccttattgtttttcagcttgatcatttttctacattgtgcgaacaccgagtccctcaggtgaacggacaagttgtaggcatgaacaggtttggccagaaccggagatcaaacaactactctaaggggtagttttcgcactagacatctatcaatatgctttcaccccatagcgccctcgcgtttcggggagacgaagcaggagatcggattgtcatgacccgccatagcttggaagactggtgtcggaggatgtctgaaaagatgtgggctcgtcagtatttcattactcaagggtgtttagaccgctattgcctgagcgcttctgctacgcctgaatcaaaggtagttctgtatcgggccccgccaggctatggaaaatctgtacaagtggccttggcagcaaacactcgcgaactggaacgtgagagcgccgtttatatcaatacccggtcgtgccctgactcatgtgacgttaatggcagtttgtttgcagcgttagttttatatcaactcgaaggagttgaatcctggcgcacgataaaaagtgacatcgacaccatcgaagttcttcgaaacgcactgtgtaatgcaaaaaagacgataagaatttgccttgatggggttggcgaggctaaacataccgcggatttgattgaggatttaatctgtgaaacaccgagcaatgtgaaatttttcattgcaccgagtcgcgtcggggcgttgccacgtttgtctatgatggcgggtgttgtaacgtatggtgctgatgaacttgtatttacagaagaggaggttagtgaattatcgggtatgggtggccccgaagccagcaacatcataaaagcgatcggtggatggccagcacttgtcaggcttatgtgccgaaccccaaacccaaatctccccgcagcgacttggccggaaactcgctcgtatttcagggacaacctcttaactgcgttacccaatagtacgaggacctttctttgcaatgcagcgatgctcgaagtaatcagcgctgaatgctatggctatgtctataagacagaagaggccgaccgggaaattacgtttcttaacgaacattatgctcttttagctcccaccgggacttctgctgatcgtatggatatgcaccctgtgctgcgagagtatttgcgtagtttatttaacaccacccaacgagaacgtcgctcgtatgtactgaaacgggtcgcgttctggcattggcgtaggggagagtacctccattcaatcaatgcagctctggaagccagtgaccatcgatgggctcgcggcgtaagtgacagcattatcctggacgtggcactcagacagggtgaaatcgaagtacttcgcacctggtttggaaaagtaccggctcgcacgataaaaaaaattgccgccttgagcataggttacgcgtggattttgtatttcagccaacaagctcgtcaagcagacgaaatactggctagttcgcttcatccgagctccaggggggcgggcaatcttgatgaggaaggatggcgggaattggttaatgcgataggcaaagctacacaggatgaattactggagagtcaggttctctgtcaaaaatggatagacgcctttggcgaccgtaacatggttggcaaaggcgcagcacttacgtgccaggcattcattgcctccagtggacgccattttgaagagttggagcgattgtcccatcgagcggctgtggccatccagtcatccaatcaacattacgcttttatttggcttaaaactgcagaaattcagggtgaactgttcaagggggacatcgcccgagcaaggagtgtgctgcttcaagcgaataaaacagcagaaaagattcaggtgccaaaaacttttttaaataaaatgtttggcacccttgagttacaaatcctacacgaacagaaccatcacctggttacccaggaatccgcacaggcttcgttggatttcgctttgaattatggcgttacagatattctgtgggggtgtacacaggcctacagccgttttctgtaccaccaagggttccaagatagagccatggccttgttggaacaatcccgcttagccgcctgcgagcgagagctgtctcgtctaaatatcctgactaaagttcagttagctgagtttactctcctgaacaacgaggaattgggtccacctatactccccgatgaatgtgagctgacgttcctgccaaatcaaaaccaggccattcaagcccgtatggccctggtaaactcaatgtatagactacggcttgggaaacagtttggtgtcgccgaaaaatatgccaaacaagcactacaaagcgccagcgcaatttcagacgctagaaccaagatcgcggcccactattgtcaggccctggcagcgtttgccctcggttcatcaaaatcggcgaagcgcacgattcttgatgcaaacctactttcggaacatttgaactgtcacttcacacggctctggatcaaagaagcgctactttctcttagcccccttgctcaggatctttttaacgatctgccagacgactctgaagctaaagctacgaaggatcccgatgtcagaatagaagactccagcgtgccacctgtgcccggcaatgcccactcaaccatcacgataaagcagatttctctgttgaaatgcgtaagcaacggaatgaccaacagagaaatcgctgaacggcttcttgtgacggaggataccgtcaaatggcatatgaagaagattttcagcgaacttaaagtaaccaaccgggttcaggcagtcactgaagctcgactgcgcggacttttatagtgctacaaaaacaaaagaggaatcgagcgaatatgcaaaaaatagttatcattggcgctggaatagccagcctgaccgccgcagaggctctccgccagaatggattcgacggaacgattaccattttgggcgaggaaaacacgctgccttaccagcgtcccccgttgtccaaagcctatttgacctcagatgagttgccctcgccaactccgatccgttctcctaatttctttcgggacaacaaagttgaatttgaacaaggcggtaaagtaatagcgcttgaacgatcggcaaagcaagtagtgattcaaggcggcaggaaaattaaatacgacacgctgattttggcaacaggagcgaggccacgtcctattgatttacctggtgagagcgcaaaaaatgttttctatctcaggaatcttgaccactccaccgcattacgtaatgccctgttagccccggaatgcgagaaggtggccattctcggcgcgggtgttatcgggcttgaagtcgcctccgctgccaatctacagggaaaacaagtctctgtgtttgaggccaacagccgagcgatgtgtcgagtagcgtcaccattaacaagtaattttgtcagaaaccgcatggcctccgccggcgtaatgttctacttcaatgctagcgtcaaccaaattctcactgagggagaccgagtttccggtatccgtttgtccgacggcactaccaaacccgcagacgtcgttgttatcggtataggagccatccccaatgctgaacttgcgcaagacgcaaacctggattgcgacggtggtattatagtagacagcggcatgcgtagctccgaccctgacatatttgcgatcggagattgcgctaaagccgtcaacgtttccaccaatacacccatccgaatagaaactattcacaatgccatgcttcaagcacaaattgcggcggctcatatttgtggcaaaccgtctccgcctgcctctcctccccgtttttggtcagatctcaacggcatgaaagtccagtgtattggaatcgccactggatacgaccgaattcagcggcgtcccacagagagtgacaatgcctgtgaattctggctcttttccggagaccggatgatcgcaactgaaacagtcaatcttcccacccggcaagccaagctatctaaagctctctccgggtaatcgagctcatagtcc

SEQ ID NO: 109 - DNA, 7675 bp, Artificial Sequence
  Synthetic vector
atcgattggatgcccgaggcatagactgtacaaaaaaacagtcataacaagccatgaaaaccgccactgcgccgttaccaccgctgcgttcggtcaaggttctggaccagttgcgtgagcgcatacgctacttgcattacagtttacgaaccgaacaggcttatgtcaattcgcctctcaggcgccgctggtgccgctggttggacgccaagggtgaatccgcctcgataccctgattactcgcttcctgcgccctctcaggcggcgataggggactggtaaaacggggattgcccagacgcctcccccgccccttcaggggcacaaatgcggccccaacggggccacgtagtggtgcgttttttgcgtttccacccttttcttccttttcccttttaaaccttttaggacgtctacaggccacgtaatccgtggcctgtagagtttaaaaagggacggatttgttgccattaagggacggatttgttgttaagaagggacggatttgttgttgtaaagggacggatttgttgtattgtgggacgcagatacagtgtccccttatacacaaggaatgtcgaacgtggcctcacccccaatggtttacaaaagcaatgccctggtcgaggccgcgtatcgcctcagtgttcaggaacagcggatcgttctggcctgtattagccaggtgaagaggagcgagcctgtcaccgatgaagtgatgtattcagtgacggcggaggacatagcgacgatggcgggtgtccctatcgaatcttcctacaaccagctcaaagaagcggccctgcgcctgaaacggcgggaagtccggttaacccaagagcccaatggcaaggggaaaagaccgagtgtgatgattaccggctgggtgcaaacaatcatctaccgggagggtgagggccgtgtagaactcaggttcaccaaagacatgctgccgtacctgacggaactcaccaaacagttcaccaaatacgccttggctgacgtggccaagatggacagcacccacgcgatcaggctttacgagctgctcatgcaatgggacagcatcggccagcgcgaaatagaaattgaccagctgcgaaagtggtttcaactggaaggccggtatccctcgatcaaggacttcaagttgcgagtgcttgatccagccgtgacgcagatcaacgagcacagcccgctacaggtggagtgggcgcagcgaaagaccgggcgcaaggtcacacatctgttgttcagttttggaccgaagaagcccgccaaggcggtgggtaaggccccagcgaagcgcaaggccgggaagatttcagatgctgagatcgcgaaacaggctcgccctggtgagacatgggaagcggcccgcgctcgactaacccagatgccgctggatctggcctagaggccgtggccaccacggcccggcctgcctttcaggctgcattattgaagcatttatcagggttattgtctcatgagcggatacatatttgaatgtatttagaaaaataaacaaaagagtttgtagaaacgcaaaaaggccatccgtcaggatggccttctgcttaatttgatgcctggcagtttatggcgggcgtcctgcccgccaccctccgggccgttgcttcgcaacgttcaaatccgctcccggcggatttgtcctactcaggagagcgttcaccgacaaacaacagataaaacgaaaggcccagtctttcgactgagcctttcgttttatttgatgcctggcagttccctactctcgcatggggagaccccacactaccatcggcgctacggcgtttcacttctgagttcggcatggggtcaggtgggaccaccgcgctactgccgccaggcaaattctgttttatcagaccgcttctgcgttctgatttaatctgtatcaggctgaaaatcttctctcatccgccaaaacagaagcttggctgcaggtcgacggatcccgggcgcgccaagcatatggaattctccaatttttattaaattagtcgctacgagatttaagacgtaattttatgcctaactgagaaagttaagccgcccactctcactctcgacatcttaaacctgagctaatcggacgcttgcgccaactacacctacgggtagtttttgctccgtcgtctgctggaaaaacacgagctggccgcaagcatgccaggtaccgcgagctactcgcgacggctgaaagcaccgaaatgagcgagctatctggtcgattttgacccggtgcccgtcttcaaaatcggcgaaggccgaagtcggccagaaatagcggcctacttcagaccttccctagtaaatattttgcaccaccgatcatgccgactacacttaagtgtagttttaatatttaacaccgtaacctatggtgaaaatttccagtcagctggcgcgagaatagcataatgaaaataataataaataatgatttcccggtcgctaaggtcggagcggatcaaattacgactctagtaagtgccaaagttcatagttgcatatatcggccaagattgagtatcgcggatggagccgctcccagagtatgcctttacagagccccacctggatatgggaaaaccgttgctcttgcgttcgagtggctacgccacagaacagccggacgtcctgcagtgtggctttctttaagagccagttcttacagtgaatttgatatctgcgcagagattattgagcagcttgaaactttcgaaatggtaaaattcagccgtgtgagagagggtgtgagcaagcctgcgctcttgcgagaccttgcatctagtctttggcagagcacctcgaataacgagatagaaacgctagtttgtttggataatattaatcatgacttagacttgccgttgttgcacgcacttatggagtttatgttaaatacaccaaaaaatatcaggtttgcagttgcaggcaatacaataaaagggttctcgcagcttaaacttgcaggcgctatgcgggagtacaccgagaaagacttggcctttagcgcagaagaggcggtggcgttagcggaggcagagtctgttcttggagttcctgaagaacagatagagaccttggtgcaagaagttgaggggtggcctgctcttgtagtttttttgttaaagcgtgagttgccggccaagcatatttcagcagtagttgaagtagacaattactttagggatgaaatatttgaggcgattcccgagcgctatcgtgtttttcttgcaaattcttcattgctcgatttcgtgacgcctgatcaatacaattatgtattcaaatgcgtcaatggggtctcatgtattaagtatttaagcactaattacatgttgcttcgccatgtgagcggtgagccagcgcagtttacactgcatccagtactgcgtaattttctacgagaaattacttggactgaaaatcctgctaaaagatcctacctgcttaagcgtgcagctttctggcattggcgtagaggtgaataccagtatgcaatacgaatatccctacgggcgaatgactgtcgctgggcagtcagcatgtctgagagaataattttagatttgtcatttcgtcagggcgaaatagatgcgctgagacagtggctgttagagctgccgaagcaggcctggcaccaaaaacccatagtgcttattagttacgcgtgggtattgtatttcagtcagcaaggcgcgcgagcagagaagttaattaaagacctatcttcacaatccgataaaaaaaataaatggcaagaaaaggaatggctgcagcttgtgcttgcaataggtaaagcaaccaaagatgaaatgctttcgagtgaggagctctgtaataagtggattagtttatttggggattcaaacgcagttggaaaaggggccgcgctaacctgtttggcttttatttttgccagtgagtatagatttgcagagttggagaaggtgctggctcaggcccaagccgtgaataaatttgcaaaacaaaattttgcttttggttggctgtatgtcgcgaggtttcaacaagccctagcaagcggaaaaatgggctgggcgaggcagattataactcaagcacgcacagacagtcgcgcgcagatgatggaatccgagtttacttcgaaaatgtttgacgctctagagcttgagttacattatgaattgcgctgcttggacacctcagaagaaaagctctccaaaattttagagttcatttccaatcacggggtgacagacgtgtttttttccgtatgccgtgctgtgtcagcttggcggcttggaaggagtgacctaaatggctccattgagatattggagtgggcgaaggcgcatgcggttgaaaaaaatctaccaagattggaagttatgagccaaattgagatctatcagcgcttagtctgtcaaggcataacgggcataaataatttaaaaactcttgaagatcataagattttctccggacagcactcagcccccctaaaagcacgcctgctgcttgttcaatcactagtgctttcccgagatcggaactttcatagtgccgcgcacagagcgttattggctattcagcaagcccgtaaaattaacgcgggccagctggaagtccgtggattattgtgtttggccggagcgcaggcaggtgccggtgatttaaaaaaggctcagcttaacattgtttatgcagtggagatagcaaaacagcttcaatgctttcaaacagttcttgatgaagtatgtttaattgagcgaataataccggcttcatgtgaagccttcacagcagttaatttagatcaagcgattggggcttttagtcttccgcgaatagttgagattggaaagtccgcagagaataaagctgacgctttattgacacggaagcagattgctgtcttgaggcttgtaaaagaggggtgctcaaacaaacaaatagcaacaaatatgcatgtcaccgaagatgctataaagtggcacatgaggaaaatatttgccaccttgaatgtagtgaatcgcacgcaagcaacaattgaagctgagcgtcaaggaattatctaaaataatcggcattaagtgatatagtgaaaagtatactcgagctcatagtccacgacgcccgtgattttgtagccctggccgacggccagcaggtaggccgacaggctcatgccggccgccgccgccttttcctcaatcgctcttcgttcgtctggaaggcagtacaccttgataggtgggctgcccttcctggttggcttggtttcatcagccatccgcttgccctcatctgttacgccggcggtagccggccagcctcgcagagcaggattcccgttgagcaccgccaggtgcgaataagggacagtgaagaaggaacacccgctcgcgggtgggcctacttcacctatcctgcccggctgacgccgttggatacaccaaggaaagtctacacgaaccctttggcaaaatcctgtatatcgtgcgaaaaaggatggatataccgaaaaaatcgctataatgaccccgaagcagggttatgcagcggaaaagcgctgcttccctgctgttttgtggaatatctaccgactggaaacaggcaaatgcaggaaattactgaactgaggggacaggcgagagaggatcaatggctatctgggggaccgagggctgtcgctgcgccaaggcacgattggagatcccctatgcggtgtgaaataccgcacagatgcgtaaggagaaaataccgcatcaggcgctcttccgcttcctcgctcactgactcgctgcgctcggtcgttcggctgcggcgagcggtatcagctcactcaaaggcggtaatacggttatccacagaatcaggggataacgcaggaaagaacatgtgagcaaaaggccagcaaaaggccaggaaccgtaaaaaggccgcgttgctggcgtttttccataggctccgcccccctgacgagcatcacaaaaatcgacgctcaagtcagaggtggcgaaacccgacaggactataaagataccaggcgtttccccctggaagctccctcgtgcgctctcctgttccgaccctgccgcttaccggatacctgtccgcctttctcccttcgggaagcgtggcgctttctcatagctcacgctgtaggtatctcagttcggtgtaggtcgttcgctccaagctgggctgtgtgcacgaaccccccgttcagcccgaccgctgcgccttatccggtaactatcgtcttgagtccaacccggtaagacacgacttatcgccactggcagcagccactggtaacaggattagcagagcgaggtatgtaggcggtgctacagagttcttgaagtggtggcctaactacggctacactagaaggacagtatttggtatctgcgctctgctgaagccagttaccttcggaaaaagagttggtagctcttgatccggcaaacaaaccaccgctggtagcggtggtttttttgtttgcaagcagcagattacgcgcagaaaaaaaggatctcaagaagatcctttgatcttttctacggggtctgacgctcagtggaacgaaaactcacgttaagggattttggtcatgagattatcaaaaaggatcttcacctagatccttttaaattaaaaatgaagttttaaatcaatctaaagtatatatgagtaaacttggtctgacagttaccaatcgattggtcggtcatttcgaaccccagagtcccgctcagaagaactcgtcaagaaggcgatagaaggcgatgcgctgcgaatcgggagcggcgataccgtaaagcacgaggaagcggtcagcccattcgccgccaagctcttcagcaatatcacgggtagccaacgctatgtcctgatagcggtccgccacacccagccggccacagtcgatgaatccagaaaagcggccattttccaccatgatattcggcaagcaggcatcgccatgggtcacgacgagatcctcgccgtcgggcatgcgcgccttgagcctggcgaacagttcggctggcgcgagcccctgatgctcttcgtccagatcatcctgatcgacaagaccggcttccatccgagtacgtgctcgctcgatgcgatgtttcgcttggtggtcgaatgggcaggtagccggatcaagcgtatgcagccgccgcattgcatcagccatgatggatactttctcggcaggagcaaggtgagatgacaggagatcctgccccggcacttcgcccaatagcagccagtcccttcccgcttcagtgacaacgtcgagcacagctgcgcaaggaacgcccgtcgtggccagccacgatagccgcgctgcctcgtcctgcagttcattcagggcaccggacaggtcggtcttgacaaaaagaaccgggcgcccctgcgctgacagccggaacacggcggcatcagagcagccgattgtctgttgtgcccagtcatagccgaatagcctctccacccaagcggccggagaacctgcgtgcaatccatcttgttcaatcatgcgaaacgatcctcatcctgtctcttgatcagatcttgatcccctgcgccatcagatccttggcggcaagaaagccatccagtttactttgcagggcttccc

SEQ ID NO: 110 - protein, 408 aa, Acinetobacter sp. ADP1
MNAPVHVDQNFEEVINAARSMREIDRKRYLWMISPALPVIGIGILAGYQFSPRPIKKIFALGGPIVLHIIIPVIDTIIGKDASNPTSEEIKQLENDPYYARLVKSFIPLQYIANVYACYLVSRKKTSFIDKILLGISMGAINGIAVNTAHELSHKADRLDHILSHLALVPTGYNHFRIEHPYGHHKRAATPEDPASSQMGETFYEFWPRTVFGSLKSAIEIETHRLKRKGKKFWSKDNELLQGWGMSAAFHSSIIAIFGKGTIPYLVTQAFYGISLFEIINYIEHYGLKRQKRADGNYERTMPEHSWNNNNIVTNLFLYQLQRHSDHHAYPTRPFQALRHFDEAPELPSGYASMLLPAMIPPLWFKMMDKRVFEHYKEDLTKANIYPKRRAKILAKFGLTDPNIENGK

SEQ ID NO: 111 - protein, 54 aa, Acinetobacter sp. ADP1
MKKYQCIVCGWIYDEAEGWPQDGIAPGTKWEDIPDDWTCPDCGVSKVDFEMIEV

SEQ ID NO: 112 - protein, 415 aa, Acinetobacter sp. ADP1
MSMKHGLFNLILVFITLLRRIIMHPIVIIGSGMAGYTLAREFRKLNPEHELVMICADDAVNYAKPTLSNALSGNKAPEQIPLGDAEKMSTQLKLQILSETWVKAINPETHELKLEKNGQETIQPYSKLVLAVGANPTRLAIAGDGSDDIHVVNSLIDYRAFRENLAKRQDKRVVILGAGLIGCEFANDLQHTGHQVTVIDLSPRPLGRLLPAHIADAFQKNLEESGIHFVLSTTVEKVSKINDGQDYAVTLANGQTLVADIVLSAIGLQPNIDLAKHAGVHTSRGILTNSLLETNLEDIYAIGDCAEVNGTLLPYVMPIMQQARALAKTLSGETTHVHYPAMPVAVKTPAAPLTVLPVPVDVDVNWETEEFEDGMLAKAIDNTDTLRGFVLLGATAGKQRLTLTKLVPDLIPAQL

SEQ ID NO: 113 - protein, 892 aa, Marinobacter aquaeoli VT8
MLSPHSALAFRGDEAGDRIVMTRHSLEDWCRRMSEKMWARQYFITQGCLDRYCLSASATPESKVVLYRAPPGYGKSVQVALAANTRELERESAVYINTRSCPDSCDVNGSLFAALVLYQLEGVESWRTIKSDIDTIEVLRNALCNAKKTIRICLDGVGEAKHTADLIEDLICETPSNVKFFIAPSRVGALPRLSMMAGVVTYGADELVFTEEEVSELSGMGGPEASNIIKAIGGWPALVRLMCRTPNPNLPAATWPETRSYFRDNLLTALPNSTRTFLCNAAMLEVISAECYGYVYKTEEADREITFLNEHYALLAPTGTSADRMDMHPVLREYLRSLFNTTQRERRSYVLKRVAFWHWRRGEYLHSINAALEASDHRWARGVSDSIILDVALRQGEIEVLRTWFGKVPARTIKKIAALSIGYAWILYFSQQARQADEILASSLHPSSRGAGNLDEEGWRELVNAIGKATQDELLESQVLCQKWIDAFGDRNMVGKGAALTCQAFIASSGRHFEELERLSHRAAVAIQSSNQHYAFIWLKTAEIQGELFKGDIARARSVLLQANKTAEKIQVPKTFLNKMFGTLELQILHEQNHHLVTQESAQASLDFALNYGVTDILWGCTQAYSRFLYHQGFQDRAMALLEQSRLAACERELSRLNILTKVQLAEFTLLNNEELGPPILPDECELTFLPNQNQAIQARMALVNSMYRLRLGKQFGVAEKYAKQALQSASAISDARTKIAAHYCQALAAFALGSSKSAKRTILDANLLSEHLNCHFTRLWIKEALLSLSPLAQDLFNDLPDDSEAKATKDPDVRIEDSSVPPVPGNAHSTITIKQISLLKCVSNGMTNREIAERLLVTEDTVKWHMKKIFSELKVTNRVQAVTEARLRGLL

SEQ ID NO: 114 - protein, 386 aa, Marinobacter aquaeoli VT8
MQKIVIIGAGIASLTAAEALRQNGFDGTITILGEENTLPYQRPPLSKAYLTSDELPSPTPIRSPNFFRDNKVEFEQGGKVIALERSAKQVVIQGGRKIKYDTLILATGARPRPIDLPGESAKNVFYLRNLDHSTALRNALLAPECEKVAILGAGVIGLEVASAANLQGKQVSVFEANSRAMCRVASPLTSNFVRNRMASAGVMFYFNASVNQILTEGDRVSGIRLSDGTTKPADVVVIGIGAIPNAELAQDANLDCDGGIIVDSGMRSSDPDIFAIGDCAKAVNVSTNTPIRIETIHNAMLQAQIAAAHICGKPSPPASPPRFWSDLNGMKVQCIGIATGYDRIQRRPTESDNACEFWLFSGDRMIATETVNLPTRQAKLSKALSG

SEQ ID NO: 115 - protein, 418 aa, Marinobacter aquaeoli VT8
MIKLKNNKVILMSMSENVLTTESLQRDPDAEGYVDRKRHLWVLSVLWPATPLIGLYLVSQTGWSIWYGLVLILWYGAVPLIDAMFGEDFSNPPESAVPRLEQDRYYRVLTYLTVPIHYAALVVSAWWVSTQPMNVFEFLALALSLGIVNGLALNTGHELGHKKETFDRWMAKLVLAVVGYGHFFIEHNKGHHRDVATPMDPATSRMGESIYSFSLREIPGAFKRAWDLEEQRLSRCGKSVWSLENEVLQPMILTAVLYAGLLAFFGPLMLIFLPIQMAFGWWQLTSANYIEHYGLLREKMSDGRYERQQPHHSWNSNHIMSNLILFHLQRHSDHHAHPTRSYQSLRDFKDLPSLPSGYPGMFLAAMFPSWFRSIMDHRVLDWAKGDLDKIQIQPGKREFYERKFGGTDSESVDTAAAK

SEQ ID NO: 116 - protein, 172 aa, Marinobacter aquaeoli VT8
MAKYQCPDCGYVYDEVVGDPHEGFPAGTTWEKIPEDWSCPDCAVRDKVDFVALQEANPELSVSATNTAVRPASQAKTEGASQKATGASTPSAKNKTKPKAKPKPNSSKSPKDSTQKDTYRKWVCITCGHIYDEALGDEAEGFPAGTRFEDIPDDWCCPDCGATKEDYVLYED

SEQ ID NO: 117 - DNA, 3758 bp, Alkanivorax borkumensis SK2
tacagacttttggtaggagaatgcagctgtgggaaaaatcacctttattgagaatgataaaactgaacatgtaacagaatttgaggcaggtattactttgatgcaagttgccttagacaacgccgttcccggtattgatggggattgcggcggggagtgtgcctgtggtacctgtcacctgattgttccagaagaatggttcgataaaaccgggccgattaatgatgctgaagaacaaatgttgtccatgacacctgagcgtgcaaaaacctctcggttggggtgtcaggttaaggccactgaggcaatggacggaatgactgttcaattgccagaatttcaaatgtaagtgcggagagcgacatgtcaacgagttcaagtacaagtaatgacatccaggcaaaaataattaacgccacatccaaagtcgtgccaatgcatctacagatcaaggcactaaaaaacttgatgaaggtgaagcggaagaccattggcacttcccgccctcaggtgcactttgttgaaaccgatttgcctgacgtcaatgatttggcgatagaagatatcgatacgagtaacccttttttataccgacaaggtaaggcgaatgcgtactttaagcggttgcgtgatgaagcgccggtgcactatcagaagaacagtgctttcgggccgttctggtcggtaacacgctacgaagatatcgtcttcgtggacaagagccatgatttgttttccgccgaaccccaaattatcttgggtgatcctccggaaggcctgtcggttgaaatgttcatcgctatggatcctcccaagcacgacgtacagcgtcgggcagtccagggtgttgttgcgcccaagaacctgaaagaaatggaaggactgatccgcaagcgcaccggggacgtactggatagcctgccgttggacactccgttcaactgggtgccggtggtgtcgaaagagctgaccgggcgcatgctagcctcactgttagatttcccgtatgacgaacgcgaaaaactggttggctggtcggatcgattgtccggcgcgtcctcggcaaccggcggcgagtttacgaatgaagatgtgttttttgatgacgcggcagatatggcgtgggctttctccaagctttggcgtgataaagaagcccgtcaaaaagcaggtgaagagccgggtttcgatttgatcagcatgcttcagtccaatgaagacacaaaagatctgatcaatcgtcctttggaattcattggtaatctcgcgttgttgattgttggcggtaatgacaccacgcgtaactcaatgagcgggggggtgctggctttaaatcagttcccagagcaattcgagaagctaaaggcgaacccaaagcttatccccaatatggtctctgaaatcattcgctggcaaacgccgcttgcgtatatgcgccgggttgccaagcaggatgtggagctgaacggacagaccatcaagaagggtgatcgcgtgctgatgtggtatgcgtcgggcaaccaggatgagagaaaatttgagaatcctgagcaattcatcatcgaccgcaaagatacgcgtaaccatgtgtcgtttggttatggggttcaccgttgtatgggcaaccgccttgccgaactgcagctgcgtattctgtgggaagagcttctccctcgctttgaaaacatcgaagtgatcggtgagccggagcgcgtgcaatcgaactttgtgcggggctattccaagatgatggttaagttgacggctaaaaaataagcccaaggcacagataaagagagaagcatggaaaacgaaaaacaagatgccactgtcatcgttggaggcgggcacgcagcaggtgcgttgatgacagccttgatacaaaagaaatatccacacgaggtggttctggtgggcgaagagccttatccgccctaccagcgcccgcctttatccaaaacgtatctgtcaggagaggttaacgaggaatctctctatttgaaaccgcgctcggtgtatgaaggtgcggggcatcagttgcgacttggtgtgcgcgttgagaacattgatcgagacaacaaaacccttacattgtcagatcagagcacactgaaatatggccgactgattcttgccacaggttcacacgttaggcgtcttaatgcgcctggatctgaattaaaaggcatccattatctgcatgacattgctgatacggatacattgcgcgatcaactgtcaccaggtgcccgtttggttattgtcggtggcggctacattggccttgaggttgcagccagtgcgagcaagaaaggcgttaatgttacggtgctggaaggcgctgagcgtctaatgcagcgagttacgggcgttgagatgtcttcgttcctgtatgctaagcacagtggttctggcgtggacgtgcgtcttaatactgctgtcaccggcttcaaagctggagatcaggggcgagtggctggcgtaacgttagcaaatggcgaaacggttgacgcagatgttgtgcttgtctcgattggcgttatacccgaaacggctttggctgaggctgccggcctatcctgtgaagacggtatcctggtggacgaatatgtccgcacttctgacccaagcatcctggcgataggtgattgcactcgtcaccgaaaccttttcttcgagaaaatgcagaggctcgagtccgttgctaacgctgtcgatcaagcacgtactgcggcagcgaccttgatgggagaggataagccctacgatagcgctccatggttttggtcgaatcaatatgatgttcgtttgcaaatggtggggctctcgcaggaccatgatgaacgagtcatgcgtggcagcacggaagacaaagcgtttgcggtgttctatctccgtgagggctgtgtgattgccgttgatgcggtgaatatgcccattgcgtttatggttggaaagcagttggttcagcaccgtaagagtattagcgctgacgtgttgagtgatctggatgttgaattaaagtctttgatctgaaggatctaggaaccaaggagagtggcatatgagtttttctaattataaagtaatcgcgatgccggtgttggttgctaattttgttttgggggcggccactgcatgggcgaatgaaaattatccggcgaaatctgctggctataatcagggtgactgggtcgctagcttcaatttttctaaggtctatgtgggtgaggagcttggcgatctaaatgttggagggggggctttgccaaatgctgatgtaagtattggtaatgatacaacacttacgtttgatatcgcctattttgttagctcaaatatagcggtggatttttttgttggggtgccagctagggctaaatttcaaggtgagaaatcaatctcctcgctgggaagagtcagtgaagttgattacggccctgcaattctttcgcttcaatatcattacgatagctttgagcgactttatccatatgttggggttggtgttggtcgggtgctattttttgataaaaccgacggtgctttgagttcgtttgatattaaggataaatgggcgcctgcttttcaggttggccttagatatgaccttggtaactcatggatgctaaattcagatgtgcgttatattcctttcaaaacggacgtcacaggtactcttggcccggttcctgtttctactaaaattgaggttgatcctttcattctcagtcttggtgcgtcatatgttttctaat

SEQ ID NO: 118 - protein, 106 aa, Alkanivorax borkumensis SK2
VGKITFIENDKTEHVTEFEAGITLMQVALDNAVPGIDGDCGGECACGTCHLIVPEEWFDKTGPINDAEEQMLSMTPERAKTSRLGCQVKATEAMDGMTVQLPEFQM

SEQ ID NO: 119 - protein, 470 aa, Alkanivorax borkumensis SK2
MSTSSSTSNDIQAKIINATSKVVPMHLQIKALKNLMKVKRKTIGTSRPQVHFVETDLPDVNDLAIEDIDTSNPFLYRQGKANAYFKRLRDEAPVHYQKNSAFGPFWSVTRYEDIVFVDKSHDLFSAEPQIILGDPPEGLSVEMFIAMDPPKHDVQRRAVQGVVAPKNLKEMEGLIRKRTGDVLDSLPLDTPFNWVPVVSKELTGRMLASLLDFPYDEREKLVGWSDRLSGASSATGGEFTNEDVFFDDAADMAWAFSKLWRDKEARQKAGEEPGFDLISMLQSNEDTKDLINRPLEFIGNLALLIVGGNDTTRNSMSGGVLALNQFPEQFEKLKANPKLIPNMVSEIIRWQTPLAYMRRVAKQDVELNGQTIKKGDRVLMWYASGNQDERKFENPEQFIIDRKDTRNHVSFGYGVHRCMGNRLAELQLRILWEELLPRFENIEVIGEPERVQSNFVRGYSKMMVKLTAKK

SEQ ID NO: 120 - protein, 410 aa, Alkanivorax borkumensis SK2
MENEKQDATVIVGGGHAAGALMTALIQKKYPHEVVLVGEEPYPPYQRPPLSKTYLSGEVNEESLYLKPRSVYEGAGHQLRLGVRVENIDRDNKTLTLSDQSTLKYGRLILATGSHVRRLNAPGSELKGIHYLHDIADTDTLRDQLSPGARLVIVGGGYIGLEVAASASKKGVNVTVLEGAERLMQRVTGVEMSSFLYAKHSGSGVDVRLNTAVTGFKAGDQGRVAGVTLANGETVDADVVLVSIGVIPETALAEAAGLSCEDGILVDEYVRTSDPSILAIGDCTRHRNLFFEKMQRLESVANAVDQARTAAATLMGEDKPYDSAPWFWSNQYDVRLQMVGLSQDHDERVMRGSTEDKAFAVFYLREGCVIAVDAVNMPIAFMVGKQLVQHRKSISADVLSDLDVELKSLI

SEQ ID NO: 121 - DNA, 11401 bp, Artificial Sequence
  Synthetic vector
tgggaagccctgcaaagtaaactggatggctttcttgccgccaaggatctgatggcgcaggggatcaagatctgatcaagagacaggatgaggatcgtttcgcatgattgaacaagatggattgcacgcaggttctccggccgcttgggtggagaggctattcggctatgactgggcacaacagacaatcggctgctctgatgccgccgtgttccggctgtcagcgcaggggcgcccggttctttttgtcaagaccgacctgtccggtgccctgaatgaactgcaggacgaggcagcgcggctatcgtggctggccacgacgggcgttccttgcgcagctgtgctcgacgttgtcactgaagcgggaagggactggctgctattgggcgaagtgccggggcaggatctcctgtcatctcaccttgctcctgccgagaaagtatccatcatggctgatgcaatgcggcggctgcatacgcttgatccggctacctgcccattcgaccaccaagcgaaacatcgcatcgagcgagcacgtactcggatggaagccggtcttgtcgatcaggatgatctggacgaagagcatcaggggctcgcgccagccgaactgttcgccaggctcaaggcgcgcatgcccgacggcgaggatctcgtcgtgacccatggcgatgcctgcttgccgaatatcatggtggaaaatggccgcttttctggattcatcgactgtggccggctgggtgtggcggaccgctatcaggacatagcgttggctacccgtgatattgctgaagagcttggcggcgaatgggctgaccgcttcctcgtgctttacggtatcgccgctcccgattcgcagcgcatcgccttctatcgccttcttgacgagttcttctgagcgggactctggggttcgaaatgaccgaccaatcgattggtaactgtcagaccaagtttactcatatatactttagattgatttaaaacttcatttttaatttaaaaggatctaggtgaagatcctttttgataatctcatgaccaaaatcccttaacgtgagttttcgttccactgagcgtcagaccccgtagaaaagatcaaaggatcttcttgagatcctttttttctgcgcgtaatctgctgcttgcaaacaaaaaaaccaccgctaccagcggtggtttgtttgccggatcaagagctaccaactctttttccgaaggtaactggcttcagcagagcgcagataccaaatactgtccttctagtgtagccgtagttaggccaccacttcaagaactctgtagcaccgcctacatacctcgctctgctaatcctgttaccagtggctgctgccagtggcgataagtcgtgtcttaccgggttggactcaagacgatagttaccggataaggcgcagcggtcgggctgaacggggggttcgtgcacacagcccagcttggagcgaacgacctacaccgaactgagatacctacagcgtgagctatgagaaagcgccacgcttcccgaagggagaaaggcggacaggtatccggtaagcggcagggtcggaacaggagagcgcacgagggagcttccagggggaaacgcctggtatctttatagtcctgtcgggtttcgccacctctgacttgagcgtcgatttttgtgatgctcgtcaggggggcggagcctatggaaaaacgccagcaacgcggcctttttacggttcctggccttttgctggccttttgctcacatgttctttcctgcgttatcccctgattctgtggataaccgtattaccgcctttgagtgagctgataccgctcgccgcagccgaacgaccgagcgcagcgagtcagtgagcgaggaagcggaagagcgcctgatgcggtattttctccttacgcatctgtgcggtatttcacaccgcataggggatctccaatcgtgccttggcgcagcgacagccctcggtcccccagatagccattgatcctctctcgcctgtcccctcagttcagtaatttcctgcatttgcctgtttccagtcggtagatattccacaaaacagcagggaagcagcgcttttccgctgcataaccctgcttcggggtcattatagcgattttttcggtatatccatcctttttcgcacgatatacaggattttgccaaagggttcgtgtagactttccttggtgtatccaacggcgtcagccgggcaggataggtgaagtaggcccacccgcgagcgggtgttccttcttcactgtcccttattcgcacctggcggtgctcaacgggaatcctgctctgcgaggctggccggctaccgccggcgtaacagatgagggcaagcggatggctgatgaaaccaagccaaccaggaagggcagcccacctatcaaggtgtactgccttccagacgaacgaagagcgattgaggaaaaggcggcggcggccggcatgagcctgtcggcctacctgctggccgtcggccagggctacaaaatcacgggcgtcgtggactatgagctcgagtatacttttcactatatcacttaatgccgattattttagataattccttgacgctcagcttcaattgttgcttgcgtgcgattcactacattcaaggtggcaaatattttcctcatgtgccactttatagcatcttcggtgacatgcatatttgttgctatttgtttgtttgagcacccctcttttacaagcctcaagacagcaatctgcttccgtgtcaataaagcgtcagctttattctctgcggactttccaatctcaactattcgcggaagactaaaagccccaatcgcttgatctaaattaactgctgtgaaggcttcacatgaagccggtattattcgctcaattaaacatacttcatcaagaactgtttgaaagcattgaagctgttttgctatctccactgcataaacaatgttaagctgagccttttttaaatcaccggcacctgcctgcgctccggccaaacacaataatccacggacttccagctggcccgcgttaattttacgggcttgctgaatagccaataacgctctgtgcgcggcactatgaaagttccgatctcgggaaagcactagtgattgaacaagcagcaggcgtgcttttaggggggctgagtgctgtccggagaaaatcttatgatcttcaagagtttttaaattatttatgcccgttatgccttgacagactaagcgctgatagatctcaatttggctcataacttccaatcttggtagatttttttcaaccgcatgcgccttcgcccactccaatatctcaatggagccatttaggtcactccttccaagccgccaagctgacacagcacggcatacggaaaaaaacacgtctgtcaccccgtgattggaaatgaactctaaaattttggagagcttttcttctgaggtgtccaagcagcgcaattcataatgtaactcaagctctagagcgtcaaacattttcgaagtaaactcggattccatcatctgcgcgcgactgtctgtgcgtgcttgagttataatctgcctcgcccagcccatttttccgcttgctagggcttgttgaaacctcgcgacatacagccaaccaaaagcaaaattttgttttgcaaatttattcacggcttgggcctgagccagcaccttctccaactctgcaaatctatactcactggcaaaaataaaagccaaacaggttagcgcggccccttttccaactgcgtttgaatccccaaataaactaatccacttattacagagctcctcactcgaaagcatttcatctttggttgctttacctattgcaagcacaagctgcagccattccttttcttgccatttattttttttatcggattgtgaagataggtctttaattaacttctctgctcgcgcgccttgctgactgaaatacaatacccacgcgtaactaataagcactatgggtttttggtgccaggcctgcttcggcagctctaacagccactgtctcagcgcatctatttcgccctgacgaaatgacaaatctaaaattattctctcagacatgctgactgcccagcgacagtcattcgcccgtagggatattcgtattgcatactggtattcacctctacgccaatgccagaaagctgcacgcttaagcaggtaggatcttttagcaggattttcagtccaagtaatttctcgtagaaaattacgcagtactggatgcagtgtaaactgcgctggctcaccgctcacatggcgaagcaacatgtaattagtgcttaaatacttaatacatgagaccccattgacgcatttgaatacataattgtattgatcaggcgtcacgaaatcgagcaatgaagaatttgcaagaaaaacacgatagcgctcgggaatcgcctcaaatatttcatccctaaagtaattgtctacttcaactactgctgaaatatgcttggccggcaactcacgctttaacaaaaaaactacaagagcaggccacccctcaacttcttgcaccaaggtctctatctgttcttcaggaactccaagaacagactctgcctccgctaacgccaccgcctcttctgcgctaaaggccaagtctttctcggtgtactcccgcatagcgcctgcaagtttaagctgcgagaacccttttattgtattgcctgcaactgcaaacctgatattttttggtgtatttaacataaactccataagtgcgtgcaacaacggcaagtctaagtcatgattaatattatccaaacaaactagcgtttctatctcgttattcgaggtgctctgccaaagactagatgcaaggtctcgcaagagcgcaggcttgctcacaccctctctcacacggctgaattttaccatttcgaaagtttcaagctgctcaataatctctgcgcagatatcaaattcactgtaagaactggctcttaaagaaagccacactgcaggacgtccggctgttctgtggcgtagccactcgaacgcaagagcaacggttttcccatatccaggtggggctctgtaaaggcatactctgggagcggctccatccgcgatactcaatcttggccgatatatgcaactatgaactttggcacttactagagtcgtaatttgatccgctccgaccttagcgaccgggaaatcattatttattattattttcattatgctattctcgcgccagctgactggaaattttcaccataggttacggtgttaaatattaaaactacacttaagtgtagtcggcatgatcggtggtgcaaaatatttactagggaaggtctgaagtaggccgctatttctggccgacttcggccttcgccgattttgaagacgggcaccgggtcaaaatcgaccagatagctcgctcatttcggtgctttcagccgtcgcgagtagctcgcggtacctggcatgcttgcggccagctcgtgtttttccagcagacgacggagcaaaaactacccgtaggtgtagttggcgcaagcgtccgattagctcaggtttaagatgtcgagagtgagagtgggcggcttaactttctcagttaggcataaaattacgtcttaaatctcgtagcgactaatttaataaaaattggagtacagacttttggtaggagaatgcagctgtgggaaaaatcacctttattgagaatgataaaactgaacatgtaacagaatttgaggcaggtattactttgatgcaagttgccttagacaacgccgttcccggtattgatggggattgcggcggggagtgtgcctgtggtacctgtcacctgattgttccagaagaatggttcgataaaaccgggccgattaatgatgctgaagaacaaatgttgtccatgacacctgagcgtgcaaaaacctctcggttggggtgtcaggttaaggccactgaggcaatggacggaatgactgttcaattgccagaatttcaaatgtaagtgcggagagcgacatgtcaacgagttcaagtacaagtaatgacatccaggcaaaaataattaacgccacatccaaagtcgtgccaatgcatctacagatcaaggcactaaaaaacttgatgaaggtgaagcggaagaccattggcacttcccgccctcaggtgcactttgttgaaaccgatttgcctgacgtcaatgatttggcgatagaagatatcgatacgagtaacccttttttataccgacaaggtaaggcgaatgcgtactttaagcggttgcgtgatgaagcgccggtgcactatcagaagaacagtgctttcgggccgttctggtcggtaacacgctacgaagatatcgtcttcgtggacaagagccatgatttgttttccgccgaaccccaaattatcttgggtgatcctccggaaggcctgtcggttgaaatgttcatcgctatggatcctcccaagcacgacgtacagcgtcgggcagtccagggtgttgttgcgcccaagaacctgaaagaaatggaaggactgatccgcaagcgcaccggggacgtactggatagcctgccgttggacactccgttcaactgggtgccggtggtgtcgaaagagctgaccgggcgcatgctagcctcactgttagatttcccgtatgacgaacgcgaaaaactggttggctggtcggatcgattgtccggcgcgtcctcggcaaccggcggcgagtttacgaatgaagatgtgttttttgatgacgcggcagatatggcgtgggctttctccaagctttggcgtgataaagaagcccgtcaaaaagcaggtgaagagccgggtttcgatttgatcagcatgcttcagtccaatgaagacacaaaagatctgatcaatcgtcctttggaattcattggtaatctcgcgttgttgattgttggcggtaatgacaccacgcgtaactcaatgagcgggggggtgctggctttaaatcagttcccagagcaattcgagaagctaaaggcgaacccaaagcttatccccaatatggtctctgaaatcattcgctggcaaacgccgcttgcgtatatgcgccgggttgccaagcaggatgtggagctgaacggacagaccatcaagaagggtgatcgcgtgctgatgtggtatgcgtcgggcaaccaggatgagagaaaatttgagaatcctgagcaattcatcatcgaccgcaaagatacgcgtaaccatgtgtcgtttggttatggggttcaccgttgtatgggcaaccgccttgccgaactgcagctgcgtattctgtgggaagagcttctccctcgctttgaaaacatcgaagtgatcggtgagccggagcgcgtgcaatcgaactttgtgcggggctattccaagatgatggttaagttgacggctaaaaaataagcccaaggcacagataaagagagaagcatggaaaacgaaaaacaagatgccactgtcatcgttggaggcgggcacgcagcaggtgcgttgatgacagccttgatacaaaagaaatatccacacgaggtggttctggtgggcgaagagccttatccgccctaccagcgcccgcctttatccaaaacgtatctgtcaggagaggttaacgaggaatctctctatttgaaaccgcgctcggtgtatgaaggtgcggggcatcagttgcgacttggtgtgcgcgttgagaacattgatcgagacaacaaaacccttacattgtcagatcagagcacactgaaatatggccgactgattcttgccacaggttcacacgttaggcgtcttaatgcgcctggatctgaattaaaaggcatccattatctgcatgacattgctgatacggatacattgcgcgatcaactgtcaccaggtgcccgtttggttattgtcggtggcggctacattggccttgaggttgcagccagtgcgagcaagaaaggcgttaatgttacggtgctggaaggcgctgagcgtctaatgcagcgagttacgggcgttgagatgtcttcgttcctgtatgctaagcacagtggttctggcgtggacgtgcgtcttaatactgctgtcaccggcttcaaagctggagatcaggggcgagtggctggcgtaacgttagcaaatggcgaaacggttgacgcagatgttgtgcttgtctcgattggcgttatacccgaaacggctttggctgaggctgccggcctatcctgtgaagacggtatcctggtggacgaatatgtccgcacttctgacccaagcatcctggcgataggtgattgcactcgtcaccgaaaccttttcttcgagaaaatgcagaggctcgagtccgttgctaacgctgtcgatcaagcacgtactgcggcagcgaccttgatgggagaggataagccctacgatagcgctccatggttttggtcgaatcaatatgatgttcgtttgcaaatggtggggctctcgcaggaccatgatgaacgagtcatgcgtggcagcacggaagacaaagcgtttgcggtgttctatctccgtgagggctgtgtgattgccgttgatgcggtgaatatgcccattgcgtttatggttggaaagcagttggttcagcaccgtaagagtattagcgctgacgtgttgagtgatctggatgttgaattaaagtctttgatctgaaggatctaggaaccaaggagagtggcatatgagtttttctaattataaagtaatcgcgatgccggtgttggttgctaattttgttttgggggcggccactgcatgggcgaatgaaaattatccggcgaaatctgctggctataatcagggtgactgggtcgctagcttcaatttttctaaggtctatgtgggtgaggagcttggcgatctaaatgttggagggggggctttgccaaatgctgatgtaagtattggtaatgatacaacacttacgtttgatatcgcctattttgttagctcaaatatagcggtggatttttttgttggggtgccagctagggctaaatttcaaggtgagaaatcaatctcctcgctgggaagagtcagtgaagttgattacggccctgcaattctttcgcttcaatatcattacgatagctttgagcgactttatccatatgttggggttggtgttggtcgggtgctattttttgataaaaccgacggtgctttgagttcgtttgatattaaggataaatgggcgcctgcttttcaggttggccttagatatgaccttggtaactcatggatgctaaattcagatgtgcgttatattcctttcaaaacggacgtcacaggtactcttggcccggttcctgtttctactaaaattgaggttgatcctttcattctcagtcttggtgcgtcatatgttttctaatcgacctgcagccaagcttctgttttggcggatgagagaagattttcagcctgatacagattaaatcagaacgcagaagcggtctgataaaacagaatttgcctggcggcagtagcgcggtggtcccacctgaccccatgccgaactcagaagtgaaacgccgtagcgccgatggtagtgtggggtctccccatgcgagagtagggaactgccaggcatcaaataaaacgaaaggctcagtcgaaagactgggcctttcgttttatctgttgtttgtcggtgaacgctctcctgagtaggacaaatccgccgggagcggatttgaacgttgcgaagcaacggcccggagggtggcgggcaggacgcccgccataaactgccaggcatcaaattaagcagaaggccatcctgacggatggcctttttgcgtttctacaaactcttttgtttatttttctaaatacattcaaatatgtatccgctcatgagacaataaccctgataaatgcttcaataatgcagcctgaaaggcaggccgggccgtggtggccacggcctctaggccagatccagcggcatctgggttagtcgagcgcgggccgcttcccatgtctcaccagggcgagcctgtttcgcgatctcagcatctgaaatcttcccggccttgcgcttcgctggggccttacccaccgccttggcgggcttcttcggtccaaaactgaacaacagatgtgtgaccttgcgcccggtctttcgctgcgcccactccacctgtagcgggctgtgctcgttgatctgcgtcacggctggatcaagcactcgcaacttgaagtccttgatcgagggataccggccttccagttgaaaccactttcgcagctggtcaatttctatttcgcgctggccgatgctgtcccattgcatgagcagctcgtaaagcctgatcgcgtgggtgctgtccatcttggccacgtcagccaaggcgtatttggtgaactgtttggtgagttccgtcaggtacggcagcatgtctttggtgaacctgagttctacacggccctcaccctcccggtagatgattgtttgcacccagccggtaatcatcacactcggtcttttccccttgccattgggctcttgggttaaccggacttcccgccgtttcaggcgcagggccgcttctttgagctggttgtaggaagattcgatagggacacccgccatcgtcgctatgtcctccgccgtcactgaatacatcacttcatcggtgacaggctcgctcctcttcacctggctaatacaggccagaacgatccgctgttcctgaacactgaggcgatacgcggcctcgaccagggcattgcttttgtaaaccattgggggtgaggccacgttcgacattccttgtgtataaggggacactgtatctgcgtcccacaatacaacaaatccgtccctttacaacaacaaatccgtcccttcttaacaacaaatccgtcccttaatggcaacaaatccgtccctttttaaactctacaggccacggattacgtggcctgtagacgtcctaaaaggtttaaaagggaaaaggaagaaaagggtggaaacgcaaaaaacgcaccactacgtggccccgttggggccgcatttgtgcccctgaaggggcgggggaggcgtctgggcaatccccgttttaccagtcccctatcgccgcctgagagggcgcaggaagcgagtaatcagggtatcgaggcggattcacccttggcgtccaaccagcggcaccagcggcgcctgagaggcgaattgacataagcctgttcggttcgtaaactgtaatgcaagtagcgtatgcgctcacgcaactggtccagaaccttgaccgaacgcagcggtggtaacggcgcagtggcggttttcatggcttgttatgactgtttttttgtacagtctatgcctcgggcatccaatcga
